(19) United States
(12) Patent Application Publication
(10) Pub. No.: US 2014/0013469 A1
(43) Pub. Date: Jan. 9, 2014

(54) ISOLATED POLYNUCLEOTIDES EXPRESSING OR MODULATING microRNAs OR TARGETS OF SAME, TRANSGENIC PLANTS COMPRISING SAME AND USES THEREOF IN IMPROVING NITROGEN USE EFFICIENCY, ABIOTIC STRESS TOLERANCE, BIOMASS, VIGOR OR YIELD OF A PLANT

(71) Applicants: Rudy Maor, Rechovot (IL); Iris Nesher, Tel Aviv (IL)

(72) Inventors: Rudy Maor, Rechovot (IL); Iris Nesher, Tel Aviv (IL)

(73) Assignee: A.B. SEEDS LTD., Lod (IL)

(21) Appl. No.: 13/881,437

(22) PCT Filed: Oct. 25, 2011
(86) PCT No.: PCT/IB2011/054763

§ 371 Date: Apr. 25, 2013

Related U.S. Application Data
(60) Provisional application No. 61/406,184, filed on Oct. 25, 2010.

(51) Int. Cl. C12N 15/82

(52) U.S. Cl. CPC C12N 15/8216
USPC 800/285; 800/278; 800/290; 800/298

(57) ABSTRACT

Isolated polynucleotides expressing or modulating microRNAs or targets of same are provided. Also provided are transgenic plants comprising same and uses thereof in improving nitrogen use efficiency, abiotic stress tolerance, biomass, vigor or yield of a plant.

### RELATED APPLICATION/S

[0001] This application claims priority from U.S. Provisional Patent Application No. 61/406,184 filed on Oct. 25, 2010, the contents of which are hereby incorporated by reference in its entirety.

### FIELD AND BACKGROUND OF THE INVENTION

[0002] The present invention, in some embodiments thereof, relates to isolated polynucleotides expressing or modulating microRNAs or targets of same, transgenic plants comprising same and uses thereof in improving nitrogen use efficiency, abiotic stress tolerance, biomass, vigor or yield of a plant.

[0003] Plant growth is reliant on a number of basic factors: light, air, water, nutrients, and physical support. All these factors, with the exception of light, are controlled by soil to some extent, which integrates non-living substances (minerals, organic matter, gases and liquids) and living organisms (bacteria, fungi, insects, worms, etc.). The soil's volume is almost equally divided between solids and water/gases. An adequate nutrition in the form of natural as well as synthetic fertilizers, may affect crop yield and quality, and its response to stress factors such as disease and adverse weather. The great importance of fertilizers can best be appreciated when considering the direct increase in crop yields over the last 40 years, and the fact that they account for most of the overhead expense in agriculture. Sixteen natural nutrients are essential for plant growth, three of which, carbon, hydrogen and oxygen, are retrieved from air and water. The soil provides the remaining 13 nutrients.

[0004] Nutrients are naturally recycled within a self-sufficient environment, such as a rainforest. However, when grown in a commercial situation, plants consume nutrients for their growth and these nutrients need to be replenished in the system. Several nutrients are consumed by plants in large quantities and are referred to as macronutrients. Three macronutrients are considered the basic building blocks of plant growth, and are provided as main fertilizers; Nitrogen (N), Phosphate (P) and Potassium (K). Yet, only nitrogen needs to be replenished every year since plants only absorb approximately half of the nitrogen fertilizer applied. A proper balance of nutrients is crucial; when too much of an essential nutrient is available, it may become toxic to plant growth. Utilization efficiencies of macronutrients directly correlate with yield and general plant tolerance, and increasing them will benefit the plants themselves and the environment by decreasing seepage to ground water.

[0005] Nitrogen is responsible for biosynthesis of amino and nucleic acids, prosthetic groups, plant hormones, plant chemical defenses, etc, and thus is utterly essential for the plant. For this reason, plants store nitrogen throughout their developmental stages, in the specific case of corn during the period of grain germination, mostly in the leaves and stalk. However, due to the low nitrogen use efficiency (NUE) of the main crops (e.g., in the range of only 30-70%), nitrogen supply needs to be replenished at least twice during the growing season. This requirement for fertilizer refill may become the rate-limiting element in plant growth and increase fertilizer expenses for the farmer. Limited land resources combined with rapid population growth will inevitably lead to added increase in fertilizer use. In light of this prediction, advanced, biotechnology-based solutions to allow stable high yields with an added potential to reduce fertilizer costs are highly desirable. Subsequently, developing plants with increased NUE will lower fertilizer input in crop cultivation, and allow growth on lower-quality soils.

[0006] The major agricultural crops (corn, rice, wheat, canola and soybean) account for over half of total human caloric intake, giving their yield and quality vast importance. They can be consumed either directly (eating their seeds which are also used as a source of sugars, oils and metabolites), or indirectly (eating meat products raised on processed seeds or forage). Various factors may influence a crop's yield, including but not limited to, quantity and size of the plant organs, plant architecture, vigor (e.g. seedling), growth rate, root development, utilization of water and nutrients (e.g., nitrogen), and stress tolerance. Plant yield may be amplified through multiple approaches; (1) enhancement of innate traits (e.g., dry matter accumulation rate, cellulose/lignin composition), (2) improvement of structural features (e.g., stalk strength, meristem size, plant branching pattern), and (3) amplification of seed yield and quality (e.g., fertilization efficiency, seed development, seed filling or content of oil, starch or protein). Increasing plant yield through any of the above methods would ultimately have many applications in agriculture and additional fields such as in the biotechnology industry.

[0007] Two main adverse environmental conditions, malnutrition (nutrient deficiency) and drought, elicit a response in the plant that mainly affects root architecture (Jiang and Huang (2001), Crop Sci 41:1168-1173; Lopez-Bucio et al. (2003), Curr Opin Plant Biol, 6:280-287; Morgan and Condon (1986), Aust J Plant Physiol 13:523-532), causing activation of plant metabolic pathways to maximize water assimilation. Improvement of root architecture, i.e. making branched and longer roots, allows the plant to reach water and nutrient/fertilizer deposits located deeper in the soil by an increase in soil coverage. Root morphogenesis has already shown to increase tolerance to low phosphorus availability in soybean (Miller et al., (2003), Funct Plant Biol 30:973-985) and maize (Zhu and Lynch (2004), Funct Plant Biol 31:949-958). Thus, genes governing enhancement of root architecture may be used to improve NUE and drought tolerance. An example for a gene associated with root developmental changes is ANR1, a putative transcription factor with a role in nitrate (NO3⁻) signaling. When expression of ANR1 is down-regulated, the resulting transgenic lines are defective in their root response to localized supplies of nitrate (Zhang and Forde (1998), Science 270:407). Enhanced root system and/or increased storage capabilities, which are seen in responses to different environmental stresses, are strongly favorable at normal or optimal growing conditions as well.

[0008] Abiotic stress refers to a range of suboptimal conditions as water deficit or drought, extreme temperatures and salt levels, and high or low light levels. High or low nutrient level also falls into the category of abiotic stress. The response to any stress may involve both stress specific and common stress pathways (Pastori and Foyer (2002), Plant Physiol, 129: 460-468), and drains energy from the plant, eventually resulting in lowered yield. Thus, distinguishing between the genes activated in each pathway and subsequent manipulation of only specific relevant genes could lead to a partial stress response without the parallel loss in yield. Contrary to the complex polygenic nature of plant traits responsible for adaptations to adverse environmental stresses, information on miRNAs involved in these responses is very limited. The most common approach for crop and horticultural improvements is through cross breeding, which is relatively slow, inefficient, and limited in the degree of variability achieved because it can only manipulate the naturally existing genetic diversity. Taken together with the limited genetic resources (i.e., compatible plant species) for crop improvement, conventional breeding is evidently unfavorable. By creating a pool of genetically modified plants, one broadens the possibilities for producing crops with improved economic or horticultural traits.

### SUMMARY OF THE INVENTION

[0009] According to an aspect of some embodiments of the present invention there is provided a method of improving nitrogen use efficiency, abiotic stress tolerance, biomass, vigor or yield of a plant, the method comprising expressing within the plant an exogenous polynucleotide having a nucleic acid sequence at least 90% identical to SEQ ID NOs: 10, 6-9, 21, 22, 23-37, 38-52, 1209, 1211, 1212, wherein said nucleic acid sequence is capable of regulating nitrogen use efficiency of the plant, thereby improving nitrogen use efficiency, abiotic stress tolerance, biomass, vigor or yield of the plant.

[0010] According to an aspect of some embodiments of the present invention there is provided a transgenic plant exogenously expressing a polynucleotide having a nucleic acid sequence at least 90% identical to SEQ ID NOs: 10, 6-9, 23-37, wherein said nucleic acid sequence is capable of regulating nitrogen use efficiency of the plant.

[0011] According to some embodiments of the invention, said exogenous polynucleotide encodes a precursor of said nucleic acid sequence.

[0012] According to some embodiments of the invention, said precursor of said nucleic acid sequence is at least 60% identical to SEQ ID NO: 21, 22, 38-52, 1209, 1211, 1212.

[0013] According to some embodiments of the invention, said exogenous polynucleotide encodes a miRNA or a precursor thereof.

[0014] According to some embodiments of the invention, said exogenous polynucleotide encodes a siRNA or a precursor thereof.

[0015] According to some embodiments of the invention, said exogenous polynucleotide is selected from the group consisting of SEQ ID NO: 10, 6-9, 21, 22, 23-37, 38-52, 1209, 1211, 1212.

[0016] According to an aspect of some embodiments of the present invention there is provided an isolated polynucleotide having a nucleic acid sequence at least 90% identical to SEQ ID NO: 6, 7 and 9, wherein said nucleic acid sequence is capable of regulating nitrogen use efficiency of a plant.

[0017] According to some embodiments of the invention, said nucleic acid sequence is selected from the group consisting of SEQ ID NO: 6, 7 and 9.

[0018] According to some embodiments of the invention, said polynucleotide encodes a precursor of said nucleic acid sequence.

[0019] According to some embodiments of the invention, said polynucleotide encodes a miRNA or a precursor thereof.

[0020] According to some embodiments of the invention, said polynucleotide encodes a siRNA or a precursor thereof.

[0021] According to an aspect of some embodiments of the present invention there is provided a nucleic acid construct comprising the isolated polynucleotide above under the regulation of a cis-acting regulatory element.

[0022] According to some embodiments of the invention, said cis-acting regulatory element comprises a promoter.

[0023] According to some embodiments of the invention, said promoter comprises a tissue-specific promoter.

[0024] According to some embodiments of the invention, said tissue-specific promoter comprises a root specific promoter.

[0025] According to an aspect of some embodiments of the present invention there is provided a method of improving nitrogen use efficiency, abiotic stress tolerance, biomass, vigor or yield of a plant, the method comprising expressing within the plant an exogenous polynucleotide which downregulates an activity or expression of a gene encoding an RNAi molecule having a nucleic acid sequence at least 90% identical to SEQ ID NOs: 4, 1-3,5,57-449, 454-846 and 53-56, 1209, thereby improving nitrogen use efficiency, abiotic stress tolerance, biomass, vigor or yield of a plant.

[0026] According to an aspect of some embodiments of the present invention there is provided a transgenic plant exogenously expressing a polynucleotide which downregulates an activity or expression of a gene encoding an RNAi molecule having a nucleic acid sequence at least 90% identical to SEQ ID NOs: 4, 1-3,5,57-449, 454-846 and 53-56, 1209.

[0027] According to an aspect of some embodiments of the present invention there is provided an isolated polynucleotide which downregulates an activity or expression of a gene encoding an RNAi molecule having a nucleic acid sequence selected from the group consisting of SEQ ID NOs: 4, 1-3,5,57-449, 454-846 and 53-56, 1209.

[0028] According to some embodiments of the invention, said polynucleotide encodes a miRNA-Resistant Target as set forth in SEQ ID N01104-1124.

[0029] According to some embodiments of the invention, said isolated polynucleotide encodes a target mimic as set forth in SEQ ID NO: 18 or 19.

[0030] According to an aspect of some embodiments of the present invention there is provided a nucleic acid construct comprising the isolated polynucleotide above under the regulation of a cis-acting regulatory element.

[0031] According to some embodiments of the invention, said cis-acting regulatory element comprises a promoter.

[0032] According to some embodiments of the invention, said promoter comprises a tissue-specific promoter.

[0033] According to some embodiments of the invention, said tissue-specific promoter comprises a root specific promoter.

[0034] According to some embodiments of the invention, the method further comprises growing the plant under limiting nitrogen conditions.

[0035] According to some embodiments of the invention, the method further comprises growing the plant under abiotic stress.

[0036] According to some embodiments of the invention, said abiotic stress is selected from the group consisting of salinity, drought, water deprivation, flood, etiolation, low temperature, high temperature, heavy metal toxicity, anaerobiosis, nutrient deficiency, nutrient excess, atmospheric pollution and UV irradiation.

[0037] According to some embodiments of the invention, the plant is a monocotyledon.

[0038] According to some embodiments of the invention, the plant is a dicotyledon.

[0039] According to an aspect of some embodiments of the present invention there is provided a method of improving nitrogen use efficiency, abiotic stress tolerance, biomass, vigor or yield of a plant, the method comprising expressing within the plant an exogenous polynucleotide encoding a polypeptide having an amino acid sequence at least 80% homologous to SEQ ID NOs: 927-1021, wherein said polypeptide is capable of regulating nitrogen use efficiency of the plant, thereby improving nitrogen use efficiency, abiotic stress tolerance, biomass, vigor or yield of the plant.

[0040] According to an aspect of some embodiments of the present invention there is provided a transgenic plant exogenously expressing a polynucleotide encoding a polypeptide having an amino acid sequence at least 80% homologous to SEQ ID NOs: 927-1021, wherein said polypeptide is capable of regulating nitrogen use efficiency of the plant.

[0041] According to an aspect of some embodiments of the present invention there is provided a nucleic acid construct comprising a polynucleotide encoding a polypeptide having an amino acid sequence at least 80% homologous to SEQ ID NOs: 927-1021, wherein said polypeptide is capable of regulating nitrogen use efficiency of the plant, and wherein said polynucleotide is under a transcriptional control of a cis-acting regulatory element.

[0042] According to some embodiments of the invention, said polynucleotide is selected from the group consisting of SEQ ID NO: 1022-1090.

[0043] According to some embodiments of the invention, said polypeptide is selected from the group consisting of SEQ ID NO: 927-1021.

[0044] According to some embodiments of the invention, said cis-acting regulatory element comprises a promoter.

[0045] According to some embodiments of the invention, said promoter comprises a tissue-specific promoter.

[0046] According to some embodiments of the invention, said tissue-specific promoter comprises a root specific promoter.

[0047] According to some embodiments of the invention, the method further comprises growing the plant under limiting nitrogen conditions.

[0048] According to some embodiments of the invention, the method further comprises growing the plant under abiotic stress.

[0049] According to some embodiments of the invention, said abiotic stress is selected from the group consisting of salinity, drought, water deprivation, flood, etiolation, low temperature, high temperature, heavy metal toxicity, anaerobiosis, nutrient deficiency, nutrient excess, atmospheric pollution and UV irradiation.

[0050] According to some embodiments of the invention, the plant is a monocotyledon.

[0051] According to some embodiments of the invention, the plant is a dicotyledon.

[0052] According to an aspect of some embodiments of the present invention there is provided a method of improving nitrogen use efficiency, abiotic stress tolerance, biomass, vigor or yield of a plant, the method comprising expressing within the plant an exogenous polynucleotide which downregulates an activity or expression of a polypeptide having an amino acid sequence at least 80% homologous to SEQ ID NOs: 854-894, wherein said polypeptide is capable of regulating nitrogen use efficiency of the plant, thereby improving nitrogen use efficiency, abiotic stress tolerance, biomass, vigor or yield of the plant.

[0053] According to an aspect of some embodiments of the present invention there is provided a transgenic plant exogenously expressing a polynucleotide which downregulates an activity or expression of a polypeptide having an amino acid sequence at least 80% homologous to SEQ ID NOs: 854-894, wherein said polypeptide is capable of regulating nitrogen use efficiency of the plant.

[0054] According to an aspect of some embodiments of the present invention there is provided a nucleic acid construct comprising a polynucleotide which downregulates an activity or expression of a polypeptide having an amino acid sequence at least 80% homologous to SEQ ID NOs: 854-894, wherein said polypeptide is capable of regulating nitrogen use efficiency of a plant, said nucleic acid sequence being under the regulation of a cis-acting regulatory element.

[0055] According to some embodiments of the invention, said polynucleotide acts by a mechanism selected from the group consisting of sense suppression, antisense suppresion, ribozyme inhibition, gene disruption.

[0056] According to some embodiments of the invention, said cis-acting regulatory element comprises a promoter.

[0057] According to some embodiments of the invention, said promoter comprises a tissue-specific promoter.

[0058] According to some embodiments of the invention, said tissue-specific promoter comprises a root specific promoter.

[0059] Unless otherwise defined, all technical and/or scientific terms used herein have the same meaning as commonly understood by one of ordinary skill in the art to which the invention pertains. Although methods and materials similar or equivalent to those described herein can be used in the practice or testing of embodiments of the invention, exemplary methods and/or materials are described below. In case of conflict, the patent specification, including definitions, will control. In addition, the materials, methods, and examples are illustrative only and are not intended to be necessarily limiting.

### BRIEF DESCRIPTION OF THE DRAWINGS

[0060] Some embodiments of the invention are herein described, by way of example only, with reference to the accompanying drawings. With specific reference now to the drawings in detail, it is stressed that the particulars shown are by way of example and for purposes of illustrative discussion of embodiments of the invention. In this regard, the description taken with the drawings makes apparent to those skilled in the art how embodiments of the invention may be practiced.

[0061] In the drawings:

[0062] FIG. 1 is a scheme of a binary vector that can be used according to some embodiments of the invention;

[0063] FIGS. 2A-J are schematic illustrations of some of the miRNA sequences which may be used in accordance with the present invention.

### DESCRIPTION OF SPECIFIC EMBODIMENTS OF THE INVENTION

[0064] The present invention, in some embodiments thereof, relates to isolated polynucleotides expressing or modulating microRNAs or targets of same, transgenic plants comprising same and uses thereof in improving nitrogen use efficiency, abiotic stress tolerance, biomass, vigor or yield of a plant.

[0065] Before explaining at least one embodiment of the invention in detail, it is to be understood that the invention is not necessarily limited in its application to the details set forth in the following description or exemplified by the Examples. The invention is capable of other embodiments or of being practiced or carried out in various ways.

[0066] The doubling of agricultural food production worldwide over the past four decades has been associated with a 7-fold increase in the use of nitrogen (N) fertilizers. As a consequence, both the recent and future intensification of the use of nitrogen fertilizers in agriculture already has and will continue to have major detrimental impacts on the diversity and functioning of the non-agricultural neighbouring bacterial, animal, and plant ecosystems. The most typical examples of such an impact are the eutrophication of freshwater and marine ecosystems as a result of leaching when high rates of nitrogen fertilizers are applied to agricultural fields. In addition, there can be gaseous emission of nitrogen oxides reacting with the stratospheric ozone and the emission of toxic ammonia into the atmosphere. Furthermore, farmers are facing increasing economic pressures with the rising fossil fuels costs required for production of nitrogen fertilizers.

[0067] It is therefore of major importance to identify the critical steps controlling plant nitrogen use efficiency (NUE). Such studies can be harnessed towards generating new energy crop species that have a larger capacity to produce biomass with the minimal amount of nitrogen fertilizer.

[0068] While reducing the present invention to practice, the present inventors have uncovered microRNA (miRNA) sequences that are differentially expressed in maize plants grown under nitrogen limiting conditions versus maize plants grown under conditions wherein nitrogen is a non-limiting factor. Following extensive experimentation and screening the present inventors have identified miRNA sequences that are upregulated or downregulated in roots and leaves, and suggest using same or sequences controlling same in the generation of transgenic plants having improved nitrogen use efficiency. While further reducing the present invention to practice, the present inventors have analyzed the level of expression of the identified miRNA sequences under optima, and nitrogen deficient conditions by quantitiative RT-PCR and validated the correlation between miRNA expression nitrogen availability. These findings support the use of the miRNA sequences or sequences controlling same or targets thereof in the generation of transgenic plants characterized by improved nitrogen use efficiency and abiotic stress tolerance.

[0069] According to some embodiments, the newly uncovered miRNA sequences relay their effect by affecting at least one of:

[0070] root architecture so as to increase nutrient uptake;

[0071] activation of plant metabolic pathways so as to maximize nitrogen absorption or localization; or alternatively or additionally

[0072] modulating plant surface permeability.

[0073] Each of the above mechanisms may affect water uptake as well as salt absorption and therefore embodiments of the invention further relate to enhancement of abiotic stress tolerance, biomass, vigor or yield of the plant.

[0074] Thus, according to an aspect of the invention there is provided a method of improving nitrogen use efficiency, abiotic stress tolerance, biomass, vigor or yield of a plant, the method comprising expressing within the plant an exogenous polynucleotide having a nucleic acid sequence at least 80%, 85%, 90% or 95% identical to SEQ ID NOs: 10, 6-9 and 23-37 wherein said nucleic acid sequence is capable of regulating nitrogen use efficiency of the plant, thereby improving nitrogen use efficiency, abiotic stress tolerance, biomass, vigor or yield of the plant.

[0075] According to a specific embodiment the exogenous polynucleotide has a nucleic acid sequence at least 90% identical to SEQ ID NOs: 10, 6-9, 23-37.

[0076] According to a specific embodiment the exogenous polynucleotide has a nucleic acid sequence at least 95% identical to SEQ ID NOs: 10, 6-9, 23-37.

[0077] According to a specific embodiment the exogenous polynucleotide has a nucleic acid sequence as set forth in SEQ ID NOs: 10, 6-9, 23-37.

[0078] As used herein the phrase “nitrogen use efficiency (NUE)” refers to a measure of crop production per unit of nitrogen fertilizer input. Fertilizer use efficiency (FUE) is a measure of NUE. Crop production can be measured by biomass, vigor or yield. The plant's nitrogen use efficiency is typically a result of an alteration in at least one of the uptake, spread, absorbance, accumulation, relocation (within the plant) and use of nitrogen absorbed by the plant. Improved NUE is with respect to that of a non-transgenic plant (i.e., lacking the transgene of the transgenic plant) of the same species and of the same developmental stage and grown under the same conditions.

[0079] As used herein the phrase “nitrogen-limiting conditions” refers to growth conditions which include a level (e.g., concentration) of nitrogen (e.g., ammonium or nitrate) applied which is below the level needed for optimal plant metabolism, growth, reproduction and/or viability.

[0080] The phrase “abiotic stress” as used herein refers to any adverse effect on metabolism, growth, viability and/or reproduction of a plant. Abiotic stress can be induced by any of suboptimal environmental growth conditions such as, for example, water deficit or drought, flooding, freezing, low or high temperature, strong winds, heavy metal toxicity, anaerobiosis, high or low nutrient levels (e.g. nutrient deficiency), high or low salt levels (e.g. salinity), atmospheric pollution, high or low light intensities (e.g. insufficient light) or UV irradiation. Abiotic stress may be a short term effect (e.g. acute effect, e.g. lasting for about a week) or alternatively may be persistent (e.g. chronic effect, e.g. lasting for example 10 days or more). The present invention contemplates situations in which there is a single abiotic stress condition or alternatively situations in which two or more abiotic stresses occur.

[0081] According to an exemplary embodiment the abiotic stress refers to salinity.

[0082] According to another exemplary embodiment the abiotic stress refers to drought.

[0083] As used herein the phrase “abiotic stress tolerance” refers to the ability of a plant to endure an abiotic stress without exhibiting substantial physiological or physical damage (e.g. alteration in metabolism, growth, viability and/or reproductivity of the plant).

[0084] As used herein the term/phrase “biomass”, “biomass of a plant” or “plant biomass” refers to the amount (e.g., measured in grams of air-dry tissue) of a tissue produced from the plant in a growing season. An increase in plant biomass can be in the whole plant or in parts thereof such as aboveground (e.g. harvestable) parts, vegetative biomass, roots and/or seeds.

[0085] As used herein the term/phrase “vigor”, “vigor of a plant” or “plant vigor” refers to the amount (e.g., measured by weight) of tissue produced by the plant in a given time. Increased vigor could determine or affect the plant yield or the yield per growing time or growing area. In addition, early vigor (e.g. seed and/or seedling) results in improved field stand.

[0086] As used herein the term/phrase “yield”, “yield of a plant” or “plant yield” refers to the amount (e.g., as determined by weight or size) or quantity (e.g., numbers) of tissues or organs produced per plant or per growing season. Increased yield of a plant can affect the economic benefit one can obtain from the plant in a certain growing area and/or growing time.

[0087] According to an exemplary embodiment the yield is measured by cellulose content.

[0088] According to another exemplary embodiment the yield is measured by oil content.

[0089] According to another exemplary embodiment the yield is measured by protein content.

[0090] According to another exemplary embodiment, the yield is measured by seed number per plant or part thereof (e.g., kernel). A plant yield can be affected by various parameters including, but not limited to, plant biomass; plant vigor; plant growth rate; seed yield; seed or grain quantity; seed or grain quality; oil yield; content of oil, starch and/or protein in harvested organs (e.g., seeds or vegetative parts of the plant); number of flowers (e.g. florets) per panicle (e.g. expressed as a ratio of number of filled seeds over number of primary panicles); harvest index; number of plants grown per area; number and size of harvested organs per plant and per area; number of plants per growing area (e.g. density); number of harvested organs in field; total leaf area; carbon assimilation and carbon partitioning (e.g. the distribution/allocation of carbon within the plant); resistance to shade; number of harvestable organs (e.g. seeds), seeds per pod, weight per seed; and modified architecture [such as increase stalk diameter, thickness or improvement of physical properties (e.g. elasticity)].

[0091] As used herein the term “improving” or “increasing” refers to at least about 2%, at least about 3%, at least about 4%, at least about 5%, at least about 10%, at least about 15%, at least about 20%, at least about 25%, at least about 30%, at least about 35%, at least about 40%, at least about 45%, at least about 50%, at least about 60%, at least about 70%, at least about 80%, at least about 90% or greater increase in NUE, in tolerance to abiotic stress, in yield, in biomass or in vigor of a plant, as compared to a native or wild-type plants [i.e., plants not genetically modified to express the biomolecules (polynucleotides) of the invention, e.g., a non-transformed plant of the same species and of the same developmental stage which is grown under the same growth conditions as the transformed plant].

[0092] Improved plant NUE is translated in the field into either harvesting similar quantities of yield, while implementing less fertilizers, or increased yields gained by implementing the same levels of fertilizers. Thus, improved NUE or FUE has a direct effect on plant yield in the field.

[0093] The term “plant” as used herein encompasses whole plants, ancestors and progeny of the plants and plant parts, including seeds, shoots, stems, roots (including tubers), and isolated plant cells, tissues and organs. The plant may be in any form including suspension cultures, embryos, meristematic regions, callus tissue, leaves, gametophytes, sporophytes, pollen, and microspores.

[0094] As used herein the phrase “plant cell” refers to plant cells which are derived and isolated from disintegrated plant cell tissue or plant cell cultures.

[0095] As used herein the phrase “plant cell culture” refers to any type of native (naturally occurring) plant cells, plant cell lines and genetically modified plant cells, which are not assembled to form a complete plant, such that at least one biological structure of a plant is not present. Optionally, the plant cell culture of this aspect of the present invention may comprise a particular type of a plant cell or a plurality of different types of plant cells. It should be noted that optionally plant cultures featuring a particular type of plant cell may be originally derived from a plurality of different types of such plant cells.

[0096] Any commercially or scientifically valuable plant is envisaged in accordance with these embodiments of the invention. Plants that are particularly useful in the methods of the invention include all plants which belong to the super family Viridiplantae, in particular monocotyledonous and dicotyledonous plants including a fodder or forage legume, ornamental plant, food crop, tree, or shrub selected from the list comprising Acacia spp., Acer spp., Actinidia spp., Aesculus spp., Agathis australis, Albizia amara, Alsophila tricolor, Andropogon spp., Arachis spp, Areca catechu, Astelia fragrans, Astragalus cicer, Baikiaea plurijuga, Betula spp., Brassica spp., Bruguiera gymnorrhiza, Burkea africana, Butea frondosa, Cadaba farinosa, Calliandra spp, Camellia sinensis, Canna indica, Capsicum spp., Cassia spp., Centroema pubescens, Chacoomeles spp., Cinnamomum cassia, Coffea arabica, Colophospermum mopane, Coronillia varia, Cotoneaster serotina, Crataegus spp., Cucumis spp., Cupressus spp., Cyathea dealbata, Cydonia oblonga, Cryptomeria japonica, Cymbopogon spp., Cynthea dealbata, Cydonia oblonga, Dalbergia monetaria, Davallia divaricata, Desmodium spp., Dicksonia squarosa, Dibeteropogon amplectens, Dioclea spp, Dolichos spp., Dorycnium rectum, Echinochloa pyramidalis, Ehraffia spp., Eleusine coracana, Eragrestis spp., Erythrina spp., Eucalyptus spp., Euclea schimperi, Eulalia vi/losa, Pagopyrum spp., Feijoa sellowlana, Fragaria spp., Flemingia spp, Freycinetia banksli, Geranium thunbergii, GinAgo biloba, Glycine javanica, Gliricidia spp, Gossypium hirsutum, Grevillea spp., Guibourtia coleosperma, Hedysarum spp., Hemaffhia altissima, Heteropogon contoffus, Hordeum vulgare, Hyparrhenia rufa, Hypericum erectum, Hypeffhelia dissolute, Indigo incamata, Iris spp., Leptarrhena pyrolifolia, Lespediza spp., Lettuca spp., Leucaena leucocephala, Loudetia simplex, Lotonus bainesli, Lotus spp., Macrotyloma axillare, Malus spp., Manihot esculenta, Medicago saliva, Metasequoia glyptostroboides, Musa sapientum, Nicotianum spp., Onobrychis spp., Ornithopus spp., Oryza spp., Peltophorum africanum, Pennisetum spp., Persea gratissima, Petunia spp., Phaseolus spp., Phoenix canariensis, Phormium cookianum, Photinia spp., Picea glauca, Pinus spp., Pisum sativam, Podocarpus totara, Pogonarthria fleckii, Pogonaffhria squarrosa, Populus spp., Prosopis cineraria, Pseudotsuga menziesii, Pterolobium stellatum, Pyrus communis, Quercus spp., Rhaphiolepsis umbellata, Rhopalostylis sapida, Rhus natalensis, Ribes grossularia, Ribes spp., Robinia pseudoacacia, Rosa spp., Rubus spp., Salix spp., Schyzachyrium sanguineum, Sciadopitys vefficillata, Sequoia sempervirens, Sequoiadendron giganteum, Sorghum bicolor, Spinacia spp., Sporobolus fimbriatus, Stiburus alopecuroides, Stylosanthos humilis, Tadehagi spp, Taxodium distichum, Themeda triandra, Trifolium spp., Triticum spp., Tsuga heterophylla, Vaccinium spp., Vicia spp., Vitis vinifera, Watsonia pyramidata, Zantedeschia aethiopica, Zea mays, amaranth, artichoke, asparagus, broccoli, Brussels sprouts, cabbage, canola, carrot, cauliflower, celery, collard greens, flax, kale, lentil, oilseed rape, okra, onion, potato, rice, soybean, straw, sugar beet, sugar cane, sunflower, tomato, squash tea, maize, wheat, barely, rye, oat, peanut, pea, lentil and alfalfa, cotton, rapeseed, canola, pepper, sunflower, tobacco, eggplant, eucalyptus, a tree, an ornamental plant, a perennial grass and a forage crop. Alternatively algae and other non-Viridiplantae can be used for the methods of the present invention.

[0097] According to some embodiments of the invention, the plant used by the method of the invention is a crop plant including, but not limited to, cotton, Brassica vegetables, oilseed rape, sesame, olive tree, palm oil, banana, wheat, corn or maize, barley, alfalfa, peanuts, sunflowers, rice, oats, sugarcane, soybean, turf grasses, barley, rye, sorghum, sugar cane, chicory, lettuce, tomato, zucchini, bell pepper, eggplant, cucumber, melon, watermelon, beans, hibiscus, okra, apple, rose, strawberry, chile, garlic, pea, lentil, canola, mums, arabidopsis, broccoli, cabbage, beet, quinoa, spinach, squash, onion, leek, tobacco, potato, sugarbeet, papaya, pineapple, mango, Arabidopsis thaliana, and also plants used in horticulture, floriculture or forestry, such as, but not limited to, poplar, fir, eucalyptus, pine, an ornamental plant, a perennial grass and a forage crop, coniferous plants, moss, algae, as well as other plants listed in World Wide Web (dot) nationmaster (dot) com/encyclopedia/Plantae.

[0098] According to a specific embodiment of the present invention, the plant comprises corn.

[0099] According to a specific embodiment of the present invention, the plant comprises sorghum.

[0100] As used herein, the phrase “exogenous polynucleotide” refers to a heterologous nucleic acid sequence which may not be naturally expressed within the plant or which overexpression in the plant is desired. The exogenous polynucleotide may be introduced into the plant in a stable or transient manner, so as to produce a ribonucleic acid (RNA) molecule. It should be noted that the exogenous polynucleotide may comprise a nucleic acid sequence which is identical or partially homologous to an endogenous nucleic acid sequence of the plant.

[0101] As mentioned the present teachings are based on the identification of miRNA sequences which modulate nitrogen use efficiency of plants.

[0102] According to some embodiments the exogenous polynucleotide encodes a miRNA or a precursor thereof.

[0103] As used herein, the phrase “microRNA (also referred to herein interchangeably as “miRNA” or “miR”) or a precursor thereof” refers to a microRNA (miRNA) molecule acting as a post-transcriptional regulator. Typically, the miRNA molecules are RNA molecules of about 20 to 22 nucleotides in length which can be loaded into a RISC complex and which direct the cleavage of another RNA molecule, wherein the other RNA molecule comprises a nucleotide sequence essentially complementary to the nucleotide sequence of the miRNA molecule.

[0104] Typically, a miRNA molecule is processed from a “pre-miRNA” or as used herein a precursor of a pre-miRNA molecule by proteins, such as DCL proteins, present in any plant cell and loaded onto a RISC complex where it can guide the cleavage of the target RNA molecules.

[0105] Pre-microRNA molecules are typically processed from pri-microRNA molecules (primary transcripts). The single stranded RNA segments flanking the pre-microRNA are important for processing of the pri-miRNA into the pre-miRNA. The cleavage site appears to be determined by the distance from the stem-ssRNA junction (Han et al. 2006, Cell 125, 887-901, 887-901).

[0106] As used herein, a “pre-miRNA” molecule is an RNA molecule of about 100 to about 200 nucleotides, preferably about 100 to about 130 nucleotides which can adopt a secondary structure comprising a double stranded RNA stem and a single stranded RNA loop (also referred to as “hairpin”) and further comprising the nucleotide sequence of the miRNA (and its complement sequence) in the double stranded RNA stem. According to a specific embodiment, the miRNA and its complement are located about 10 to about 20 nucleotides from the free ends of the miRNA double stranded RNA stem. The length and sequence of the single stranded loop region are not critical and may vary considerably, e.g. between 30 and 50 nt in length. The complementarity between the miRNA and its complement need not be perfect and about 1 to 3 bulges of unpaired nucleotides can be tolerated. The secondary structure adopted by an RNA molecule can be predicted by computer algorithms conventional in the art such as mFOLD. The particular strand of the double stranded RNA stem from the pre-miRNA which is released by DCL activity and loaded onto the RISC complex is determined by the degree of complementarity at the 5′ end, whereby the strand which at its 5′ end is the least involved in hydrogen bounding between the nucleotides of the different strands of the cleaved dsRNA stem is loaded onto the RISC complex and will determine the sequence specificity of the target RNA molecule degradation. However, if empirically the miRNA molecule from a particular synthetic pre-miRNA molecule is not functional (because the “wrong” strand is loaded on the RISC complex), it will be immediately evident that this problem can be solved by exchanging the position of the miRNA molecule and its complement on the respective strands of the dsRNA stem of the pre-miRNA molecule. As is known in the art, binding between A and U involving two hydrogen bounds, or G and U involving two hydrogen bounds is less strong that between G and C involving three hydrogen bounds. Exemplary hairpin sequences are provided in Tables 1, 3 and 4, below.

[0107] Naturally occurring miRNA molecules may be comprised within their naturally occurring pre-miRNA molecules but they can also be introduced into existing pre-miRNA molecule scaffolds by exchanging the nucleotide sequence of the miRNA molecule normally processed from such existing pre-miRNA molecule for the nucleotide sequence of another miRNA of interest. The scaffold of the pre-miRNA can also be completely synthetic. Likewise, synthetic miRNA molecules may be comprised within, and processed from, existing pre-miRNA molecule scaffolds or synthetic pre-miRNA scaffolds. Some pre-miRNA scaffolds may be preferred over others for their efficiency to be correctly processed into the designed microRNAs, particularly when expressed as a chimeric gene wherein other DNA regions, such as untranslated leader sequences or transcription termination and polyadenylation regions are incorporated in the primary transcript in addition to the pre-microRNA.

[0108] According to the present teachings, the miRNA molecules may be naturally occurring or synthetic.

[0109] Thus, the present teachings contemplate expressing an exogenous polynucleotide having a nucleic acid sequence at least 90%, 91%, 92%, 93%, 94%, 95%, 96%, 97%, 98% 99% or 100% identical to SEQ ID NOs 1-10, 23-37, 57-449, provided that they regulate nitrogen use efficiency.

[0110] Alternatively or additionally, the present teachings contemplate expressing an exogenous polynucleotide having a nucleic acid sequence at least 65%, 50%, 75%, 80%, 85%, 90%, 91%, 92%, 93%, 94%, 95%, 96%, 97%, 98% 99% or 100% identical to SEQ ID NOs. 1-10, 21 and 22 (mature and precursors Tables 1 and 3, and FIGS. 2A-H representing the core maize genes), provided that they regulate nitrogen use efficiency.

[0111] Tables 1 and 3 below illustrates exemplary miRNA sequences and precursors thereof which over expression are associated with modulation of nitrogen use efficiency.

[0112] The present invention envisages the use of homologous and orthologous sequences of the above miRNA molecules. At the precursor level use of homologous sequences can be done to a much broader extend. Thus, in such precursor sequences the degree of homology may be lower in all those sequences not including the mature miRNA segment therein.

[0113] As used herein, the phrase “stem-loop precursor” refers to stem loop precursor RNA structure from which the miRNA can be processed.

[0114] Pre-microRNA molecules are typically processed from pri-microRNA molecules (primary transcripts). The single stranded RNA segments flanking the pre-microRNA are important for processing of the pri-miRNA into the pre-miRNA. The cleavage site appears to be determined by the distance from the stem-ssRNA junction (Han et al. 2006, Cell 125, 887-901, 887-901).

[0115] As used herein, a “pre-miRNA” molecule is an RNA molecule of about 100 to about 200 nucleotides, preferably about 100 to about 130 nucleotides which can adopt a secondary structure comprising a double stranded RNA stem and a single stranded RNA loop (also referred to as “hairpin”) and further comprising the nucleotide sequence of the miRNA (and its complement sequence) in the double stranded RNA stem. According to a specific embodiment, the miRNA and its complement are located about 10 to about 20 nucleotides from the free ends of the miRNA double stranded RNA stem. The length and sequence of the single stranded loop region are not critical and may vary considerably, e.g. between 30 and 50 nt in length. The complementarity between the miRNA and its complement need not be perfect and about 1 to 3 bulges of unpaired nucleotides can be tolerated. The secondary structure adopted by an RNA molecule can be predicted by computer algorithms conventional in the art such as mFOLD. The particular strand of the double stranded RNA stem from the pre-miRNA which is released by DCL activity and loaded onto the RISC complex is determined by the degree of complementarity at the 5′ end, whereby the strand which at its 5′ end is the least involved in hydrogen bounding between the nucleotides of the different strands of the cleaved dsRNA stem is loaded onto the RISC complex and will determine the sequence specificity of the target RNA molecule degradation. However, if empirically the miRNA molecule from a particular synthetic pre-miRNA molecule is not functional (because the “wrong” strand is loaded on the RISC complex), it will be immediately evident that this problem can be solved by exchanging the position of the miRNA molecule and its complement on the respective strands of the dsRNA stem of the pre-miRNA molecule. As is known in the art, binding between A and U involving two hydrogen bounds, or G and U involving two hydrogen bounds is less strong that between G and C involving three hydrogen bounds.

[0116] Thus, according to a specific embodiment, the exogenous polynucleotide encodes a stem-loop precursor of the nucleic acid sequence. Such a stem-loop precursor can be at least about 60%, at least about 65%, at least about 70%, at least about 75%, at least about 80%, at least about 85%, at least about 90%, at least about 95% or more identical to SEQ ID NOs: 21-22, 38-52, 1209, 1211, 1212, 454-846, 53-56, 1209 (homologs precursor Tables 1 and 3 and FIGS. 2A-H), provided that it regulates nitrogen use efficiency.

[0117] Identity (e.g., percent identity) can be determined using any homology comparison software, including for example, the BlastN software of the National Center of Biotechnology Information (NCBI) such as by using default parameters.

[0118] Homology (e.g., percent homology, identity+similarity) can be determined using any homology comparison software, including for example, the TBLASTN software of the National Center of Biotechnology Information (NCBI) such as by using default parameters.

[0119] According to some embodiments of the invention, the term “homology” or “homologous” refers to identity of two or more nucleic acid sequences; or identity of two or more amino acid sequences.

[0120] Homologous sequences include both orthologous and paralogous sequences. The term “paralogous” relates to gene-duplications within the genome of a species leading to paralogous genes. The term “orthologous” relates to homologous genes in different organisms due to ancestral relationship.

[0121] One option to identify orthologues in monocot plant species is by performing a reciprocal blast search. This may be done by a first blast involving blasting the sequence-of-interest against any sequence database, such as the publicly available NCBI database which may be found at: Hypertext Transfer Protocol://World Wide Web (dot) ncbi (dot) nlm (dot) nih (dot) gov. The blast results may be filtered. The full-length sequences of either the filtered results or the non-filtered results are then blasted back (second blast) against the sequences of the organism from which the sequence-of-interest is derived. The results of the first and second blasts are then compared. An orthologue is identified when the sequence resulting in the highest score (best hit) in the first blast identifies in the second blast the query sequence (the original sequence-of-interest) as the best hit. Using the same rational a paralogue (homolog to a gene in the same organism) is found. In case of large sequence families, the ClustalW program may be used [Hypertext Transfer Protocol://World Wide Web (dot) ebi (dot) ac (dot) uk/Tools/clustalw2/index (dot) html], followed by a neighbor-joining tree (Hypertext Transfer Protocol://en (dot) wikipedia (dot) org/wiki/Neighbor-joining) which helps visualizing the clustering.

[0122] Interestingly, while screening for RNAi regulatory sequences, the present inventors have identified a number of miRNA sequences which have never been described before.

[0123] Thus, according to an aspect of the invention there is provided an isolated polynucleotide having a nucleic acid sequence at least 80%, 85% or preferably 90%, 91%, 92%, 93%, 94%, 95%, 96%, 97%, 98% 99% or 100% identical to SEQ ID NO: 6, 7, 9, 1209, 1210, 1211, 1212 (Table 1 predicted both upregulated and downregulated), wherein said nucleic acid sequence is capable of regulating nitrogen use efficiency of a plant.

[0124] According to a specific embodiment, the isolated polynucleotide encodes a stem-loop precursor of the nucleic acid sequence.

[0125] According to a specific embodiment, the stem-loop precursor is at least about 60%, at least about 65%, at least about 70%, at least about 75%, at least about 80%, at least about 85%, at least about 90%, at least about 95% or more identical to the precursor sequence of SEQ ID NOs: 21, 22, 38-52, 1209, 1211, 1212, 454-846 and 53-56, 1209 (predicted stem and loop), provided that it regulates nitrogen use efficiency.

[0126] As mentioned, the present inventors have also identified RNAi sequences which are down regulated under nitrogen limiting conditions.

[0127] Thus, according to an aspect of the invention there is provided a method of improving nitrogen use efficiency, abiotic stress tolerance, biomass, vigor or yield of a plant, the method comprising expressing within the plant an exogenous polynucleotide which downregulates an activity or expression of a gene encoding a miRNA molecule having a nucleic acid sequence at least 80%, 85% or preferably 90%, 95% or even 100% identical to the sequence selected from the group consisting of SEQ ID NOs: 4, 1-3,5,53-56, 1209, 57-449, 454-846 (Tables 1 and 4 down-regulated), thereby improving nitrogen use efficiency, abiotic stress tolerance, biomass, vigor or yield of a plant

[0128] There are various approaches to down regulate miRNA sequences.

[0129] As used herein the term “down-regulation” refers to reduced activity or expression of the miRNA (at least 10%, 20%, 30%, 50%, 60%, 70%, 80%, 90% or 100% reduction in activity or expression) as compared to its activity or expression in a plant of the same species and the same developmental stage not expressing the exogenous polynucleotide.

[0130] Nucleic acid agents that down-regulate miR activity include, but are not limited to, a target mimic, a micro-RNA resistant gene and a miRNA inhibitor.

[0131] The target mimic or micro-RNA resistant target is essentially complementary to the microRNA provided that one or more of following mismatches are allowed:

[0132] (a) a mismatch between the nucleotide at the 5′ end of the microRNA and the corresponding nucleotide sequence in the target mimic or micro-RNA resistant target;

[0133] (b) a mismatch between any one of the nucleotides in position 1 to position 9 of the microRNA and the corresponding nucleotide sequence in the target mimic or micro-RNA resistant target; or

[0134] (c) three mismatches between any one of the nucleotides in position 12 to position 21 of the microRNA and the corresponding nucleotide sequence in the target mimic or micro-RNA resistant target provided that there are no more than two consecutive mismatches.

[0135] The target mimic RNA is essentially similar to the target RNA modified to render it resistant to miRNA induced cleavage, e.g. by modifying the sequence thereof such that a variation is introduced in the nucleotide of the target sequence complementary to the nucleotides 10 or 11 of the miRNA resulting in a mismatch.

[0136] Alternatively, a microRNA-resistant target may be implemented. Thus, a silent mutation may be introduced in the microRNA binding site of the target gene so that the DNA and resulting RNA sequences are changed in a way that prevents microRNA binding, but the amino acid sequence of the protein is unchanged. Thus, a new sequence can be synthesized instead of the existing binding site, in which the DNA sequence is changed, resulting in lack of miRNA binding to its target.

[0137] Tables 10 and 11 below provide non-limiting examples of target mimics and target resistant sequences that can be used to down-regulate the activity of the miRs of the invention.

[0138] According to a specific embodiment, the target mimic or micro-RNA resistant target is linked to the promoter naturally associated with the pre-miRNA recognizing the target gene and introduced into the plant cell. In this way, the miRNA target mimic or micro-RNA resistant target RNA will be expressed under the same circumstances as the miRNA and the target mimic or micro-RNA resistant target RNA will substitute for the non-target mimic/micro-RNA resistant target RNA degraded by the miRNA induced cleavage.

[0139] Non-functional miRNA alleles or miRNA resistant target genes may also be introduced by homologous recombination to substitute the miRNA encoding alleles or miRNA sensitive target genes.

[0140] Recombinant expression is effected by cloning the nucleic acid of interest (e.g., miRNA, target gene, silencing agent etc) into a nucleic acid expression construct under the expression of a plant promoter, as further described hereinbelow.

[0141] In other embodiments of the invention, synthetic single stranded nucleic acids are used as miRNA inhibitors. A miRNA inhibitor is typically between about 17 to 25 nucleotides in length and comprises a 5′ to 3′ sequence that is at least 90% complementary to the 5′ to 3′ sequence of a mature miRNA. In certain embodiments, a miRNA inhibitor molecule is 17, 18, 19, 20, 21, 22, 23, 24, or 25 nucleotides in length, or any range derivable therein. Moreover, a miRNA inhibitor has a sequence (from 5′ to 3′) that is or is at least 90, 91, 92, 93, 94, 95, 96, 97, 98, 99, 99.1, 99.2, 99.3, 99.4, 99.5, 99.6, 99.7, 99.8, 99.9 or 100% complementary, or any range derivable therein, to the 5′ to 3′ sequence of a mature miRNA, particularly a mature, naturally occurring miRNA.

[0142] While further reducing the present invention to practice, the present inventors have identified gene targets for the differentially expressed miRNA molecules. It is therefore contemplated, that gene targets of those miRNAs that are down regulated during stress should be overexpressed in order to confer tolerance, while gene targets of those miRNAs that are up regulated during stress should be downregulated in the plant in order to confer tolerance.

[0143] Thus, according to an aspect of the invention there is provided a method of improving nitrogen use efficiency, abiotic stress tolerance, biomass, vigor or yield of a plant, the method comprising expressing within the plant an exogenous polynucleotide encoding a polypeptide having an amino acid sequence at least 80%, 82%, 84%, 85%, 86%, 88%, 90%, 92%, 94%, 95%, 96%, 97%, 98%, 99% or 100% homologous to SEQ ID NOs: 927-1021 (gene targets of down regulated miRNAs, see Table 6), wherein said polypeptide is capable of regulating nitrogen use efficiency of the plant, thereby improving nitrogen use efficiency, abiotic stress tolerance, biomass, vigor or yield of the plant.

[0144] Nucleic acid sequences (also referred to herein as polynucleotides) of the polypeptides of some embodiments of the invention may be optimized for expression in a specific plant host. Examples of such sequence modifications include, but are not limited to, an altered G/C content to more closely approach that typically found in the plant species of interest, and the removal of codons atypically found in the plant species commonly referred to as codon optimization.

[0145] The phrase “codon optimization” refers to the selection of appropriate DNA nucleotides for use within a structural gene or fragment thereof that approaches codon usage within the plant of interest. Therefore, an optimized gene or nucleic acid sequence refers to a gene in which the nucleotide sequence of a native or naturally occurring gene has been modified in order to utilize statistically-preferred or statistically-favored codons within the plant. The nucleotide sequence typically is examined at the DNA level and the coding region optimized for expression in the plant species determined using any suitable procedure, for example as described in Sardana et al. (1996, Plant Cell Reports 15:677-681). In this method, the standard deviation of codon usage, a measure of codon usage bias, may be calculated by first finding the squared proportional deviation of usage of each codon of the native gene relative to that of highly expressed plant genes, followed by a calculation of the average squared deviation. The formula used is: 1 SDCU=n=1 N [(Xn—Yn)/Yn]2/N, where Xn refers to the frequency of usage of codon n in highly expressed plant genes, where Yn to the frequency of usage of codon n in the gene of interest and N refers to the total number of codons in the gene of interest. A table of codon usage from highly expressed genes of dicotyledonous plants is compiled using the data of Murray et al. (1989, Nuc Acids Res. 17:477-498).

[0146] One method of optimizing the nucleic acid sequence in accordance with the preferred codon usage for a particular plant cell type is based on the direct use, without performing any extra statistical calculations, of codon optimization tables such as those provided on-line at the Codon Usage Database through the NIAS (National Institute of Agrobiological Sciences) DNA bank in Japan (www.kazusa.or.jp/codon/). The Codon Usage Database contains codon usage tables for a number of different species, with each codon usage table having been statistically determined based on the data present in Genbank.

[0147] By using the above tables to determine the most preferred or most favored codons for each amino acid in a particular species (for example, rice), a naturally-occurring nucleotide sequence encoding a protein of interest can be codon optimized for that particular plant species. This is effected by replacing codons that may have a low statistical incidence in the particular species genome with corresponding codons, in regard to an amino acid, that are statistically more favored. However, one or more less-favored codons may be selected to delete existing restriction sites, to create new ones at potentially useful junctions (5′ and 3′ ends to add signal peptide or termination cassettes, internal sites that might be used to cut and splice segments together to produce a correct full-length sequence), or to eliminate nucleotide sequences that may negatively effect mRNA stability or expression.

[0148] The naturally-occurring encoding nucleotide sequence may already, in advance of any modification, contain a number of codons that correspond to a statistically-favored codon in a particular plant species. Therefore, codon optimization of the native nucleotide sequence may comprise determining which codons, within the native nucleotide sequence, are not statistically-favored with regards to a particular plant, and modifying these codons in accordance with a codon usage table of the particular plant to produce a codon optimized derivative. A modified nucleotide sequence may be fully or partially optimized for plant codon usage provided that the protein encoded by the modified nucleotide sequence is produced at a level higher than the protein encoded by the corresponding naturally occurring or native gene. Construction of synthetic genes by altering the codon usage is described in for example PCT Patent Application 93/07278.

[0149] Target genes which are contemplated according to the present teachings are provided in the polynucleotide sequences which comprise nucleic acid sequences as set forth in the maize polynucleotides listed in Tables 5 and 6). However the present teachings also relate to orthologs or homologs at least about 60%, at least about 65%, at least about 70%, at least about 75%, at least about 80%, at least about 85%, at least about 90%, or at least about 95% or more identical or similar to SEQ ID NO: 895-926 or 1022-1090 (polynucleotides listed in Tables 5 and 6). Parameters for determining the level of identity are provided hereinbelow.

[0150] Alternatively or additionally, target genes which are contemplated according to the present teachings are provided in the polypeptide sequences which comprise amino acid sequences as set forth the maize polypeptides of Tables 5 and 6). However the present teachings also relate to of orthologs or homologs at least about 60%, at least about 65%, at least about 70%, at least about 75%, at least about 80%, at least about 85%, at least about 90%, or at least about 95% or more identical or similar to SEQ ID NO: 854-894 or 927-1021 (Tables 5 and 6).

[0151] Homology (e.g., percent homology, identity+similarity) can be determined using any homology comparison software, including for example, the TBLASTN software of the National Center of Biotechnology Information (NCBI) such as by using default parameters, when starting from a polypeptide sequence; or the tBLASTX algorithm (available via the NCBI) such as by using default parameters, which compares the six-frame conceptual translation products of a nucleotide query sequence (both strands) against a protein sequence database.

[0152] According to some embodiments of the invention, the term “homology” or “homologous” refers to identity of two or more nucleic acid sequences; or identity of two or more amino acid sequences.

[0153] Homologous sequences include both orthologous and paralogous sequences. The term “paralogous” relates to gene-duplications within the genome of a species leading to paralogous genes. The term “orthologous” relates to homologous genes in different organisms due to ancestral relationship.

[0154] One option to identify orthologues in monocot plant species is by performing a reciprocal blast search. This may be done by a first blast involving blasting the sequence-of-interest against any sequence database, such as the publicly available NCBI database which may be found at: Hypertext Transfer Protocol://World Wide Web (dot) ncbi (dot) nlm (dot) nih (dot) gov. The blast results may be filtered. The full-length sequences of either the filtered results or the non-filtered results are then blasted back (second blast) against the sequences of the organism from which the sequence-of-interest is derived. The results of the first and second blasts are then compared. An orthologue is identified when the sequence resulting in the highest score (best hit) in the first blast identifies in the second blast the query sequence (the original sequence-of-interest) as the best hit. Using the same rational a paralogue (homolog to a gene in the same organism) is found. In case of large sequence families, the ClustalW program may be used [Hypertext Transfer Protocol://World Wide Web (dot) ebi (dot) ac (dot) uk/Tools/clustalw2/index (dot) html], followed by a neighbor-joining tree (Hypertext Transfer Protocol://en (dot) wikipedia (dot) org/wiki/Neighbor-joining) which helps visualizing the clustering.

[0155] As mentioned the present inventors have also identified genes which down-regulation may be done in order to improve their NUE, biomass, vigor, yield and abiotic stress tolerance.

[0156] Thus, according to an aspect of the invention there is provided a method of improving nitrogen use efficiency, abiotic stress tolerance, biomass, vigor or yield of a plant, the method comprising expressing within the plant an exogenous polynucleotide which downregulates an activity or expression of a polypeptide having an amino acid sequence at least 80%, 85%, 90%, 95%, or 100% homologous to SEQ ID NOs: 854-894 (polypeptides of Table 5), wherein said polypeptide is capable of regulating nitrogen use efficiency of the plant, thereby improving nitrogen use efficiency, abiotic stress tolerance, biomass, vigor or yield of the plant.

[0157] Down regulation of activity or expression is by at least 10%, 20%, 30%, 40%, 50%, 60%, 70%, 80%, 90% or even complete (100%) loss of activity or expression. Assays for measuring gene expression can be effected at the protein level (e.g., Western blot, ELISA) or at the mRNA level such as by RT-PCR.

[0158] According to a specific embodiment the amino acid sequence of the target gene is as set forth in SEQ ID NOs: 854-894 of Table 5.

[0159] Alternatively or additionally, the amino acid sequence of the target gene is encoded by a polynucleotide sequence as set forth in SEQ ID NOs: 895-926 of Table 5.

[0160] Examples of polynucleotide downregulating agents that inhibit (also referred to herein as inhibitors or nucleic acid agents) the expression of a target gene are given below.

[0161] 1. Polynucleotide-Based Inhibition of Gene Expression.

[0162] It will be appreciated, that any of these methods when specifically referring to downregulating expression/activity of the target genes can be used, at least in part, to downregulate expression or activity of endogenous RNA molecules.

[0163] i. Sense Suppression/Cosuppression

[0164] In some embodiments of the invention, inhibition of the expression of target gene may be obtained by sense suppression or cosuppression. For cosuppression, an expression cassette is designed to express an RNA molecule corresponding to all or part of a messenger RNA encoding a target gene in the “sense” orientation. Over-expression of the RNA molecule can result in reduced expression of the native gene. Accordingly, multiple plant lines transformed with the cosuppression expression cassette are screened to identify those that show the greatest inhibition of target gene expression.

[0165] The polynucleotide used for cosuppression may correspond to all or part of the sequence encoding the target gene, all or part of the 5′ and/or 3′ untranslated region of a target transcript, or all or part of both the coding sequence and the untranslated regions of a transcript encoding the target gene. In some embodiments where the polynucleotide comprises all or part of the coding region for the target gene, the expression cassette is designed to eliminate the start codon of the polynucleotide so that no protein product will be transcribed.

[0166] Cosuppression may be used to inhibit the expression of plant genes to produce plants having undetectable protein levels for the proteins encoded by these genes. See, for example, Broin, et al., (2002) Plant Cell 15:1517-1532. Cosuppression may also be used to inhibit the expression of multiple proteins in the same plant. Methods for using cosuppression to inhibit the expression of endogenous genes in plants are described in Flavell, et al., (1995) Proc. Natl. Acad. Sci. USA 91:3590-3596; Jorgensen, et al., (1996) Plant Mol. Biol. 31:957-973; Johansen and Carrington, (2001) Plant Physiol. 126:930-938; Broin, et al., (2002) Plant Cell 15:1517-1532; Stoutjesdijk, et al., (2002) Plant Physiol. 129:1723-1731; Yu, et al., (2003) Phytochemistry 63:753-763; and U.S. Pat. Nos. 5,035,323, 5,283,185 and 5,952,657; each of which is herein incorporated by reference. The efficiency of cosuppression may be increased by including a poly-dt region in the expression cassette at a position 3′ to the sense sequence and 5′ of the polyadenylation signal. See, US Patent Publication Number 20020058815, herein incorporated by reference. Typically, such a nucleotide sequence has substantial sequence identity to the sequence of the transcript of the endogenous gene, optimally greater than about 65% sequence identity, more optimally greater than about 85% sequence identity, most optimally greater than about 95% sequence identity. See, U.S. Pat. Nos. 5,283,185 and 5,035,323; herein incorporated by reference.

[0167] Transcriptional gene silencing (TGS) may be accomplished through use of hpRNA constructs wherein the inverted repeat of the hairpin shares sequence identity with the promoter region of a gene to be silenced. Processing of the hpRNA into short RNAs which can interact with the homologous promoter region may trigger degradation or methylation to result in silencing. (Aufsatz, et al., (2002) PNAS 99(4):16499-16506; Mette, et al., (2000) EMBO J. 19(19):5194-5201)

[0168] ii. Antisense Suppression

[0169] In some embodiments of the invention, inhibition of the expression of the target gene may be obtained by antisense suppression. For antisense suppression, the expression cassette is designed to express an RNA molecule complementary to all or part of a messenger RNA encoding the target gene. Over-expression of the antisense RNA molecule can result in reduced expression of the native gene. Accordingly, multiple plant lines transformed with the antisense suppression expression cassette are screened to identify those that show the greatest inhibition of target gene expression.

[0170] The polynucleotide for use in antisense suppression may correspond to all or part of the complement of the sequence encoding the target gene, all or part of the complement of the 5′ and/or 3′ untranslated region of the target gene transcript, or all or part of the complement of both the coding sequence and the untranslated regions of a transcript encoding the target gene. In addition, the antisense polynucleotide may be fully complementary (i.e., 100% identical to the complement of the target sequence) or partially complementary (i.e., less than 100% identical to the complement of the target sequence) to the target sequence. Antisense suppression may be used to inhibit the expression of multiple proteins in the same plant. Furthermore, portions of the antisense nucleotides may be used to disrupt the expression of the target gene. Generally, sequences of at least 50 nucleotides, 100 nucleotides, 200 nucleotides, 300, 500, 550, 500, 550 or greater may be used. Methods for using antisense suppression to inhibit the expression of endogenous genes in plants are described, for example, in Liu, et al., (2002) Plant Physiol. 129:1732-1753 and U.S. Pat. No. 5,759,829, which is herein incorporated by reference. Efficiency of antisense suppression may be increased by including a poly-dt region in the expression cassette at a position 3′ to the antisense sequence and 5′ of the polyadenylation signal. See, US Patent Publication Number 20020058815.

[0171] iii. Double-Stranded RNA Interference

[0172] In some embodiments of the invention, inhibition of the expression of a target gene may be obtained by double-stranded RNA (dsRNA) interference. For dsRNA interference, a sense RNA molecule like that described above for cosuppression and an antisense RNA molecule that is fully or partially complementary to the sense RNA molecule are expressed in the same cell, resulting in inhibition of the expression of the corresponding endogenous messenger RNA.

[0173] Expression of the sense and antisense molecules can be accomplished by designing the expression cassette to comprise both a sense sequence and an antisense sequence. Alternatively, separate expression cassettes may be used for the sense and antisense sequences. Multiple plant lines transformed with the dsRNA interference expression cassette or expression cassettes are then screened to identify plant lines that show the greatest inhibition of target gene expression. Methods for using dsRNA interference to inhibit the expression of endogenous plant genes are described in Waterhouse, et al., (1998) Proc. Natl. Acad. Sci. USA 95:13959-13965, Liu, et al., (2002) Plant Physiol. 129:1732-1753, and WO 99/59029, WO 99/53050, WO 99/61631, and WO 00/59035;

[0174] iv. Hairpin RNA Interference and Intron-Containing Hairpin RNA Interference

[0175] In some embodiments of the invention, inhibition of the expression of one or more target gene may be obtained by hairpin RNA (hpRNA) interference or intron-containing hairpin RNA (ihpRNA) interference. These methods are highly efficient at downregulating the expression of endogenous genes. See, Waterhouse and Helliwell, (2003) Nat. Rev. Genet. 5:29-38 and the references cited therein.

[0176] For hpRNA interference, the expression cassette is designed to express an RNA molecule that hybridizes with itself to form a hairpin structure that comprises a single-stranded loop region and a base-paired stem. The base-paired stem region comprises a sense sequence corresponding to all or part of the endogenous messenger RNA encoding the gene whose expression is to be inhibited, and an antisense sequence that is fully or partially complementary to the sense sequence. Thus, the base-paired stem region of the molecule generally determines the specificity of the RNA interference. hpRNA molecules are highly efficient at inhibiting the expression of endogenous genes, and the RNA interference they induce is inherited by subsequent generations of plants. See, for example, Chuang and Meyerowitz, (2000) Proc. Natl. Acad. Sci. USA 97:5985-5990; Stoutjesdijk, et al., (2002) Plant Physiol. 129:1723-1731; and Waterhouse and Helliwell, (2003) Nat. Rev. Genet. 5:29-38. Methods for using hpRNA interference to inhibit or silence the expression of genes are described, for example, in Chuang and Meyerowitz, (2000) Proc. Natl. Acad. Sci. USA 97:5985-5990; Stoutjesdijk, et al., (2002) Plant Physiol. 129:1723-1731; Waterhouse and Helliwell, (2003) Nat. Rev. Genet. 5:29-38; Pandolfini, et al., BMC Biotechnology 3:7, and US Patent Publication Number 20030175965; each of which is herein incorporated by reference. A transient assay for the efficiency of hpRNA constructs to silence gene expression in vivo has been described by Panstruga, et al., (2003) Mol. Biol. Rep. 30:135-150, herein incorporated by reference.

[0177] For ihpRNA, the interfering molecules have the same general structure as for hpRNA, but the RNA molecule additionally comprises an intron that is capable of being spliced in the cell in which the ihpRNA is expressed. The use of an intron minimizes the size of the loop in the hairpin RNA molecule following splicing, and this increases the efficiency of interference. See, for example, Smith, et al., (2000) Nature 507:319-320. In fact, Smith, et al., show 100% suppression of endogenous gene expression using ihpRNA-mediated interference. Methods for using ihpRNA interference to inhibit the expression of endogenous plant genes are described, for example, in Smith, et al., (2000) Nature 507:319-320; Wesley, et al., (2001) Plant J. 27:584, 1-3, 590; Wang and Waterhouse, (2001) Curr. Opin. Plant Biol. 5:156-150; Waterhouse and Helliwell, (2003) Nat. Rev. Genet. 5:29-38; Helliwell and Waterhouse, (2003) Methods 30:289-295, and US Patent Publication Number 20030180955, each of which is herein incorporated by reference.

[0178] The expression cassette for hpRNA interference may also be designed such that the sense sequence and the antisense sequence do not correspond to an endogenous RNA. In this embodiment, the sense and antisense sequence flank a loop sequence that comprises a nucleotide sequence corresponding to all or part of the endogenous messenger RNA of the target gene. Thus, it is the loop region that determines the specificity of the RNA interference. See, for example, WO 02/00905, herein incorporated by reference.

[0179] v. Amplicon-Mediated Interference

[0180] Amplicon expression cassettes comprise a plant virus-derived sequence that contains all or part of the target gene but generally not all of the genes of the native virus. The viral sequences present in the transcription product of the expression cassette allow the transcription product to direct its own replication. The transcripts produced by the amplicon may be either sense or antisense relative to the target sequence (i.e., the messenger RNA for target gene). Methods of using amplicons to inhibit the expression of endogenous plant genes are described, for example, in Angell and Baulcombe, (1997) EMBO J. 16:3675-3685, Angell and Baulcombe, (1999) Plant J. 20:357-362, and U.S. Pat. No. 6,656,805, each of which is herein incorporated by reference.

[0181] vi. Ribozymes

[0182] In some embodiments, the polynucleotide expressed by the expression cassette of the invention is catalytic RNA or has ribozyme activity specific for the messenger RNA of target gene. Thus, the polynucleotide causes the degradation of the endogenous messenger RNA, resulting in reduced expression of the target gene. This method is described, for example, in U.S. Pat. No. 5,987,071, herein incorporated by reference.

[0183] 2. Gene Disruption

[0184] In some embodiments of the present invention, the activity of a miRNA or a target gene is reduced or eliminated by disrupting the gene encoding the target polypeptide. The gene encoding the target polypeptide may be disrupted by any method known in the art. For example, in one embodiment, the gene is disrupted by transposon tagging. In another embodiment, the gene is disrupted by mutagenizing plants using random or targeted mutagenesis, and selecting for plants that have reduced response regulator activity.

[0185] Any of the nucleic acid agents described herein (for overexpression or downregulation of either the target gene of the miRNA) can be provided to the plant as naked RNA or expressed from a nucleic acid expression construct, where it is operaly linked to a regulatory sequence.

[0186] According to a specific embodiment of the invention, there is provided a nucleic acid construct comprising a nucleic acid sequence encoding a the nucleic acid agent (e.g., miRNA or a precursor thereof as described herein, gene targetm or silencing agent), said nucleic acid sequence being under a transcriptional control of a regulatory sequence such as a tissue specific promoter.

[0187] An exemplary nucleic acid construct which can be used for plant transformation include, the pORE E2 binary vector (FIG. 1) in which the relevant nucleic acid sequence is ligated under the transcriptional control of a promoter.

[0188] A coding nucleic acid sequence is “operably linked” or “transcriptionally linked to a regulatory sequence (e.g., promoter)” if the regulatory sequence is capable of exerting a regulatory effect on the coding sequence linked thereto. Thus, the regulatory sequence controls the transcription of the miRNA or precursor thereof, gene target or silencing agent.

[0189] The term “regulatory sequence”, as used herein, means any DNA, that is involved in driving transcription and controlling (i.e., regulating) the timing and level of transcription of a given DNA sequence, such as a DNA coding for a miRNA, precursor or inhibitor of same. For example, a 5′ regulatory region (or “promoter region”) is a DNA sequence located upstream (i.e., 5′) of a coding sequence and which comprises the promoter and the 5′-untranslated leader sequence. A 3′ regulatory region is a DNA sequence located downstream (i.e., 3′) of the coding sequence and which comprises suitable transcription termination (and/or regulation) signals, including one or more polyadenylation signals.

[0190] For the purpose of the invention, the promoter is a plant-expressible promoter. As used herein, the term “plant-expressible promoter” means a DNA sequence which is capable of controlling (initiating) transcription in a plant cell. This includes any promoter of plant origin, but also any promoter of non-plant origin which is capable of directing transcription in a plant cell, i.e., certain promoters of viral or bacterial origin Thus, any suitable promoter sequence can be used by the nucleic acid construct of the present invention. According to some embodiments of the invention, the promoter is a constitutive promoter, a tissue-specific promoter or an inducible promoter (e.g. an abiotic stress-inducible promoter).

[0191] Suitable constitutive promoters include, for example, hydroperoxide lyase (HPL) promoter, CaMV 35S promoter (Odell et al, Nature 313:810-812, 1985); Arabidopsis At6669 promoter (see PCT Publication No. WO04081173A2); Arabidopsis new At6669 promoter; maize Ubi 1 (Christensen et al., Plant Sol. Biol. 18:675-689, 1992); rice actin (McElroy et al., Plant Cell 2:163-171, 1990); pEMU (Last et al, Theor. Appl. Genet. 81:584, 1-3, 588, 1991); CaMV 19S (Nilsson et al, Physiol. Plant 100:456-462, 1997); GOS2 (de Pater et al, Plant J November; 2(6):837-44, 1992); ubiquitin (Christensen et al, Plant MoI. Biol. 18: 675-689, 1992); Rice cyclophilin (Bucholz et al, Plant MoI Biol. 25(5):837-43, 1994); Maize H3 histone (Lepetit et al, MoI. Gen. Genet. 231: 276-285, 1992); Actin 2 (An et al, Plant J. 10(1); 107-121, 1996) and Synthetic Super MAS (Ni et al., The Plant Journal 7: 661-76, 1995). Other constitutive promoters include those in U.S. Pat. Nos. 5,659,026, 5,608,149; 5,608,144; 5,604,121; 5,569,597: 5,466,785; 5,399,680; 5,268,463; and 5,608,142.

[0192] Suitable tissue-specific promoters include, but not limited to, leaf-specific promoters [such as described, for example, by Yamamoto et al., Plant J. 12:255-265, 1997; Kwon et al., Plant Physiol. 105:357-67, 1994; Yamamoto et al., Plant Cell Physiol. 35:773-778, 1994; Gotor et al., Plant J. 3:509-18, 1993; Orozco et al., Plant MoI. Biol. 23:1129-1138, 1993; and Matsuoka et al., Proc. Natl. Acad. Sci. USA 90:9586-9590, 1993], seed-preferred promoters [e.g., from seed specific genes (Simon, et al., Plant MoI. Biol. 5. 191, 1985; Scofield, et al., J. Biol. Chem. 262: 12202, 1987; Baszczynski, et al., Plant MoI. Biol. 14: 633, 1990), Brazil Nut albumin (Pearson' et al., Plant MoI. Biol. 18: 235-245, 1992), legumin (Ellis, et al. Plant MoI. Biol. 10: 203-214, 1988), Glutelin (rice) (Takaiwa, et al., MoI. Gen. Genet. 208: 15-22, 1986; Takaiwa, et al., FEBS Letts. 221: 43-47, 1987), Zein (Matzke et al., Plant MoI Biol, 143)323-32 1990), napA (Stalberg, et al., Planta 199: 515-519, 1996), Wheat SPA (Albanietal, Plant Cell, 9: 171-184, 1997), sunflower oleosin (Cummins, et al, Plant MoI. Biol. 19: 873-876, 1992)], endosperm specific promoters [e.g., wheat LMW and HMW, glutenin-1 (MoI Gen Genet 216:81-90, 1989; NAR 17:461-2), wheat a, b and g gliadins (EMBO3: 1409-15, 1984), Barley ltrl promoter, barley Bl, C, D hordein (Theor Appl Gen 98:1253-62, 1999; Plant J 4:343-55, 1993; MoI Gen Genet 250:750-60, 1996), Barley DOF (Mena et al., The Plant Journal, 116(1): 53-62, 1998), Biz2 (EP99106056.7), Synthetic promoter (Vicente-Carbajosa et al., Plant J. 13: 629-640, 1998), rice prolamin NRP33, rice-globulin GIb-I (Wu et al., Plant Cell Physiology 39(8) 885-889, 1998), rice alpha-globulin REB/OHP-1 (Nakase et al. Plant MoI. Biol. 33: 513-S22, 1997), rice ADP-glucose PP (Trans Res 6:157-68, 1997), maize ESR gene family (Plant J 12:235-46, 1997), sorghum gamma-kafirin (PMB 32:1029-35, 1996); e.g., the Napin promoter], embryo specific promoters [e.g., rice OSH1 (Sato et al, Proc. Natl. Acad. Sci. USA, 93: 8117-8122), KNOX (Postma-Haarsma et al, Plant MoI. Biol. 39:257-71, 1999), rice oleosin (Wu et at, J. Biochem., 123:386, 1998)], and flower-specific promoters [e.g., AtPRP4, chalene synthase (chsA) (Van der Meer, et al., Plant MoI. Biol. 15, 95-109, 1990), LAT52 (Twell et al., MoI. Gen Genet. 217:240-245; 1989), apetala-3]. Also contemplated are root-specific promoters such as the ROOTP promoter described in Vissenberg K, et al. Plant Cell Physiol. 2005 January; 46(1):192-200.

[0193] The nucleic acid construct of some embodiments of the invention can further include an appropriate selectable marker and/or an origin of replication.

[0194] The nucleic acid construct of some embodiments of the invention can be utilized to stably or transiently transform plant cells. In stable transformation, the exogenous polynucleotide is integrated into the plant genome and as such it represents a stable and inherited trait. In transient transformation, the exogenous polynucleotide is expressed by the cell transformed but it is not integrated into the genome and as such it represents a transient trait.

[0195] When naked RNA or DNA is introduced into a cell, the polynucleotides may be synthesized using any method known in the art, including either enzymatic syntheses or solid-phase syntheses. These are especially useful in the case of short polynucleotide sequences with or without modifications as explained above. Equipment and reagents for executing solid-phase synthesis are commercially available from, for example, Applied Biosystems. Any other means for such synthesis may also be employed; the actual synthesis of the oligonucleotides is well within the capabilities of one skilled in the art and can be accomplished via established methodologies as detailed in, for example: Sambrook, J. and Russell, D. W. (2001), “Molecular Cloning: A Laboratory Manual”; Ausubel, R. M. et al., eds. (1994, 1989), “Current Protocols in Molecular Biology,” Volumes I-III, John Wiley & Sons, Baltimore, Md.; Perbal, B. (1988), “A Practical Guide to Molecular Cloning,” John Wiley & Sons, New York; and Gait, M. J., ed. (1984), “Oligonucleotide Synthesis”; utilizing solid-phase chemistry, e.g. cyanoethyl phosphoramidite followed by deprotection, desalting, and purification by, for example, an automated trityl-on method or HPLC.

[0196] There are various methods of introducing foreign genes into both monocotyledonous and dicotyledonous plants (Potrykus, L, Annu. Rev. Plant. Physiol, Plant. MoI. Biol. (1991) 42:205-225; Shimamoto et al., Nature (1989) 338:274-276).

[0197] The principle methods of causing stable integration of exogenous DNA into plant genomic DNA include two main approaches:

[0198] (i) Agrobacterium-mediated gene transfer (e.g., T-DNA using Agrobacterium tumefaciens or Agrobacterium rhizogenes); see for example, Klee et al. (1987) Annu. Rev. Plant Physiol. 38:467-486; Klee and Rogers in Cell Culture and Somatic Cell Genetics of Plants, Vol. 6, Molecular Biology of Plant Nuclear Genes, eds. Schell, J., and Vasil, L. K., Academic Publishers, San Diego, Calif. (1989) p. 2-25; Gatenby, in Plant Biotechnology, eds. Kung, S, and Arntzen, C. J., Butterworth Publishers, Boston, Mass. (1989) p. 93-112.

[0199] (ii) Direct DNA uptake: Paszkowski et al., in Cell Culture and Somatic Cell Genetics of Plants, Vol. 6, Molecular Biology of Plant Nuclear Genes eds. Schell, J., and Vasil, L. K., Academic Publishers, San Diego, Calif. (1989) p. 52-68; including methods for direct uptake of DNA into protoplasts, Toriyama, K. et al. (1988) Bio/Technology 6:1072-1074. DNA uptake induced by brief electric shock of plant cells: Zhang et al. Plant Cell Rep. (1988) 7:379-384. Fromm et al. Nature (1986) 319:791-793. DNA injection into plant cells or tissues by particle bombardment, Klein et al. Bio/Technology (1988) 6:559-563; McCabe et al. Bio/Technology (1988) 6:923-926; Sanford, Physiol. Plant. (1990) 79:206-209; by the use of micropipette systems: Neuhaus et al., Theor. Appl. Genet. (1987) 75:30-36; Neuhaus and Spangenberg, Physiol. Plant. (1990) 79:213-217; glass fibers or silicon carbide whisker transformation of cell cultures, embryos or callus tissue, U.S. Pat. No. 5,464,765 or by the direct incubation of DNA with germinating pollen, DeWet et al. in Experimental Manipulation of Ovule Tissue, eds. Chapman, G. P. and Mantell, S. H. and Daniels, W. Longman, London, (1985) p. 197-209; and Ohta, Proc. Natl. Acad. Sci. USA (1986) 83:715-719.

[0200] The Agrobacterium system includes the use of plasmid vectors that contain defined DNA segments that integrate into the plant genomic DNA. Methods of inoculation of the plant tissue vary depending upon the plant species and the Agrobacterium delivery system. A widely used approach is the leaf disc procedure which can be performed with any tissue explant that provides a good source for initiation of whole plant differentiation. See, e.g., Horsch et al. in Plant Molecular Biology Manual A5, Kluwer Academic Publishers, Dordrecht (1988) p. 1-9. A supplementary approach employs the Agrobacterium delivery system in combination with vacuum infiltration. The Agrobacterium system is especially viable in the creation of transgenic dicotyledonous plants.

[0201] According to a specific embodiment of the present invention, the exogenous polynucleotide is introduced into the plant by infecting the plant with a bacteria, such as using a floral dip transformation method (as described in further detail in Example 5, of the Examples section which follows).

[0202] There are various methods of direct DNA transfer into plant cells. In electroporation, the protoplasts are briefly exposed to a strong electric field. In microinjection, the DNA is mechanically injected directly into the cells using very small micropipettes. In microparticle bombardment, the DNA is adsorbed on microprojectiles such as magnesium sulfate crystals or tungsten particles, and the microprojectiles are physically accelerated into cells or plant tissues.

[0203] Following stable transformation plant propagation is exercised. The most common method of plant propagation is by seed. Regeneration by seed propagation, however, has the deficiency that due to heterozygosity there is a lack of uniformity in the crop, since seeds are produced by plants according to the genetic variances governed by Mendelian rules. Basically, each seed is genetically different and each will grow with its own specific traits. Therefore, it is preferred that the transformed plant be produced such that the regenerated plant has the identical traits and characteristics of the parent transgenic plant. For this reason it is preferred that the transformed plant be regenerated by micropropagation which provides a rapid, consistent reproduction of the transformed plants.

[0204] Micropropagation is a process of growing new generation plants from a single piece of tissue that has been excised from a selected parent plant or cultivar. The new generation plants which are produced are genetically identical to, and have all of the characteristics of, the original plant. Micropropagation allows mass production of quality plant material in a short period of time and offers a rapid multiplication of selected cultivars in the preservation of the characteristics of the original transgenic or transformed plant. The advantages of cloning plants are the speed of plant multiplication and the quality and uniformity of plants produced.

[0205] Micropropagation is a multi-stage procedure that requires alteration of culture medium or growth conditions between stages. Thus, the micropropagation process involves four basic stages: Stage one, initial tissue culturing; stage two, tissue culture multiplication; stage three, differentiation and plant formation; and stage four, greenhouse culturing and hardening. During stage one, initial tissue culturing, the tissue culture is established and certified contaminant-free. During stage two, the initial tissue culture is multiplied until a sufficient number of tissue samples are produced to meet production goals. During stage three, the tissue samples grown in stage two are divided and grown into individual plantlets. At stage four, the transformed plantlets are transferred to a greenhouse for hardening where the plants' tolerance to light is gradually increased so that it can be grown in the natural environment.

[0206] Although stable transformation is presently preferred, transient transformation of leaf cells, meristematic cells or the whole plant is also envisaged by the present invention.

[0207] Transient transformation can be effected by any of the direct DNA transfer methods described above or by viral infection using modified plant viruses.

[0208] Viruses that have been shown to be useful for the transformation of plant hosts include CaMV, Tobacco mosaic virus (TMV), brome mosaic virus (BMV) and Bean Common Mosaic Virus (BV or BCMV). Transformation of plants using plant viruses is described in U.S. Pat. No. 4,855,237 (bean golden mosaic virus; BGV), EP-A 67,553 (TMV), Japanese Published Application No. 63-14693 (TMV), EPA 194,809 (BV), EPA 278,667 (BV); and Gluzman, Y. et al., Communications in Molecular Biology: Viral Vectors, Cold Spring Harbor Laboratory, New York, pp. 172-189 (1988). Pseudovirus particles for use in expressing foreign DNA in many hosts, including plants are described in WO 87/06261. According to some embodiments of the invention, the virus used for transient transformations is avirulent and thus is incapable of causing severe symptoms such as reduced growth rate, mosaic, ring spots, leaf roll, yellowing, streaking, pox formation, tumor formation and pitting. A suitable avirulent virus may be a naturally occurring avirulent virus or an artificially attenuated virus. Virus attenuation may be effected by using methods well known in the art including, but not limited to, sub-lethal heating, chemical treatment or by directed mutagenesis techniques such as described, for example, by Kurihara and Watanabe (Molecular Plant Pathology 4:259-269, 2003), Galon et al. (1992), Atreya et al. (1992) and Huet et al. (1994).

[0209] Suitable virus strains can be obtained from available sources such as, for example, the American Type culture Collection (ATCC) or by isolation from infected plants. Isolation of viruses from infected plant tissues can be effected by techniques well known in the art such as described, for example by Foster and Tatlor, Eds. “Plant Virology Protocols: From Virus Isolation to Transgenic Resistance (Methods in Molecular Biology (Humana Pr), VoI 81)”, Humana Press, 1998. Briefly, tissues of an infected plant believed to contain a high concentration of a suitable virus, preferably young leaves and flower petals, are ground in a buffer solution (e.g., phosphate buffer solution) to produce a virus infected sap which can be used in subsequent inoculations.

[0210] Construction of plant RNA viruses for the introduction and expression of non-viral exogenous polynucleotide sequences in plants is demonstrated by the above references as well as by Dawson, W. O. et al, Virology (1989) 172:285-292; Takamatsu et al. EMBO J. (1987) 6:307-311; French et al. Science (1986) 231:1294-1297; Takamatsu et al. FEBS Letters (1990) 269:73-76; and U.S. Pat. No. 5,316,931.

[0211] When the virus is a DNA virus, suitable modifications can be made to the virus itself. Alternatively, the virus can first be cloned into a bacterial plasmid for ease of constructing the desired viral vector with the foreign DNA. The virus can then be excised from the plasmid. If the virus is a DNA virus, a bacterial origin of replication can be attached to the viral DNA, which is then replicated by the bacteria. Transcription and translation of this DNA will produce the coat proteins which will encapsidate the viral DNA. If the virus is an RNA virus, the virus is generally cloned as a cDNA and inserted into a plasmid. The plasmid is then used to make all of the constructions. The RNA virus is then produced by transcribing the viral sequence of the plasmid and translation of the viral genes to produce the coat protein(s) which encapsidate the viral RNA.

[0212] In one embodiment, a plant viral nucleic acid is provided in which the native coat protein coding sequence has been deleted from a viral nucleic acid, a non-native plant viral coat protein coding sequence and a non-native promoter, preferably the subgenomic promoter of the non-native coat protein coding sequence, capable of expression in the plant host, packaging of the recombinant plant viral nucleic acid, and ensuring a systemic infection of the host by the recombinant plant viral nucleic acid, has been inserted. Alternatively, the coat protein gene may be inactivated by insertion of the non-native nucleic acid sequence within it, such that a protein is produced. The recombinant plant viral nucleic acid may contain one or more additional non-native subgenomic promoters. Each non-native subgenomic promoter is capable of transcribing or expressing adjacent genes or nucleic acid sequences in the plant host and incapable of recombination with each other and with native subgenomic promoters. Non-native (foreign) nucleic acid sequences may be inserted adjacent the native plant viral subgenomic promoter or the native and a non-native plant viral subgenomic promoters if more than one nucleic acid sequence is included. The non-native nucleic acid sequences are transcribed or expressed in the host plant under control of the subgenomic promoter to produce the desired products.

[0213] In a second embodiment, a recombinant plant viral nucleic acid is provided as in the first embodiment except that the native coat protein coding sequence is placed adjacent one of the non-native coat protein subgenomic promoters instead of a non-native coat protein coding sequence.

[0214] In a third embodiment, a recombinant plant viral nucleic acid is provided in which the native coat protein gene is adjacent its subgenomic promoter and one or more non-native subgenomic promoters have been inserted into the viral nucleic acid. The inserted non-native subgenomic promoters are capable of transcribing or expressing adjacent genes in a plant host and are incapable of recombination with each other and with native subgenomic promoters. Non-native nucleic acid sequences may be inserted adjacent the non-native subgenomic plant viral promoters such that the sequences are transcribed or expressed in the host plant under control of the subgenomic promoters to produce the desired product.

[0215] In a fourth embodiment, a recombinant plant viral nucleic acid is provided as in the third embodiment except that the native coat protein coding sequence is replaced by a non-native coat protein coding sequence.

[0216] The viral vectors are encapsidated by the coat proteins encoded by the recombinant plant viral nucleic acid to produce a recombinant plant virus. The recombinant plant viral nucleic acid or recombinant plant virus is used to infect appropriate host plants. The recombinant plant viral nucleic acid is capable of replication in the host, systemic spread in the host, and transcription or expression of foreign gene(s) (isolated nucleic acid) in the host to produce the desired sequence.

[0217] In addition to the above, the nucleic acid molecule of the present invention can also be introduced into a chloroplast genome thereby enabling chloroplast expression.

[0218] A technique for introducing exogenous nucleic acid sequences to the genome of the chloroplasts is known. This technique involves the following procedures. First, plant cells are chemically treated so as to reduce the number of chloroplasts per cell to about one. Then, the exogenous nucleic acid is introduced via particle bombardment into the cells with the aim of introducing at least one exogenous nucleic acid molecule into the chloroplasts. The exogenous nucleic acid is selected such that it is integratable into the chloroplast's genome via homologous recombination which is readily effected by enzymes inherent to the chloroplast. To this end, the exogenous nucleic acid includes, in addition to a gene of interest, at least one nucleic acid stretch which is derived from the chloroplast's genome. In addition, the exogenous nucleic acid includes a selectable marker, which serves by sequential selection procedures to ascertain that all or substantially all of the copies of the chloroplast genomes following such selection will include the exogenous nucleic acid. Further details relating to this technique are found in U.S. Pat. Nos. 4,945,050; and 5,693,507 which are incorporated herein by reference.

[0219] Regardless of the method of transformation, propagation or regeneration, the present invention also contemplates a transgenic plant exogenously expressing the polynucleotide/nucleic acid agent of the invention.

[0220] According to a specific embodiment, the transgenic plant exogenously expresses a polynucleotide having a nucleic acid sequence at least, 80%, 85%, 90%, 95% or even 100% identical to SEQ ID NOs: 2-20, 23-37, 57-449, 21-22, 38-52, 1209, 1211, 1212, 454-846 and 53-56, 1209 (Tables 1, 3 and 4), wherein said nucleic acid sequence is capable of regulating nitrogen use efficiency of the plant.

[0221] According to further embodiments, the exogenous polynucleotide encodes a precursor of said nucleic acid sequence.

[0222] According to yet further embodiments, the stem-loop precursor is at least 60%, 65%, 70%, 75%, 80%, 85%, 90%, 95% or even 100% identical to SEQ ID NOs: 21-22, 38-52, 1209, 1211, 1212, 454-846, 53-56, 1209 (Tables 1, 3 and 4) identical to SEQ ID NO: 21-22, 38-52, 1209, 1211, 1212, 54-846 and 53-56, 1209 (precursor sequences of Tables 1, 3 and 4). More specifically the exogenous polynucleotide is selected from the group consisting of SEQ ID NO: 21-22 and 38-52, 1209, 1211, 1212 (precursor and mature sequences of upregulated Tables 1 and 3).

[0223] Alternatively, there is provided a transgenic plant exogenously expressing a polynucleotide which downregulates an activity or expression of a gene encoding a miRNA molecule having a nucleic acid sequence selected from the group consisting of SEQ ID NOs: 4, 1-3,5,57-449, 454-846 and 53-56, 1209 (downregulated Tables 1 and 4) or homologs thereof which are at least at least 80%, 85%, 90% or 95% identical to SEQ ID NOs: 4, 1-3,5,57-449, 454-846 and 53-56, 1209 (downregulated Tables 1 and 4).

[0224] More specifically, the transgenic plant expresses the nucleic acid agent of Tables 8-11.

[0225] More specifically, the transgenic plant expresses the nucleic acid agent of Tables 8 and 11.

[0226] Alternatively or additionally there is provided a transgenic plant exogenously expressing a polynucleotide encoding a polypeptide having an amino acid sequence at least 80%, 85%, 90%, 95% or even 100% homologous to SEQ ID NOs: 854-894 (polypeptides of Table 5), wherein said polypeptide is capable of regulating nitrogen use efficiency of the plant.

[0227] Alternatively or additionally there is provided a transgenic plant exogenously expressing a polynucleotide encoding a polypeptide having an amino acid sequence at least 80%, 85%, 90%, 95% or even 100% homologous to SEQ ID NOs: 927-1021 (polypeptides of Table 6), wherein said polypeptide is capable of regulating nitrogen use efficiency of the plant.

[0228] Alternatively or additionally there is provided a transgenic plant exogenously expressing a polynucleotide which downregulates an activity or expression of a polypeptide having an amino acid sequence at least 80%, 85%, 90%, 95% or even 100% homologous to SEQ ID NOs: 854-894, 927-1021 (targets of Tables 5 and 6), wherein said polypeptide is capable of regulating nitrogen use efficiency of the plant.

[0229] Also contemplated are hybrids of the above described transgenic plants. A “hybrid plant” refers to a plant or a part thereof resulting from a cross between two parent plants, wherein one parent is a genetically engineered plant of the invention (transgenic plant expressing an exogenous miRNA sequence or a precursor thereof). Such a cross can occur naturally by, for example, sexual reproduction, or artificially by, for example, in vitro nuclear fusion. Methods of plant breeding are well-known and within the level of one of ordinary skill in the art of plant biology.

[0230] Since nitrogen use efficiency, abiotic stress tolerance as well as yield, vigor or biomass of the plant can involve multiple genes acting additively or in synergy (see, for example, in Quesda et al., Plant Physiol. 130:951-063, 2002), the invention also envisages expressing a plurality of exogenous polynucleotides in a single host plant to thereby achieve superior effect on the efficiency of nitrogen use, yield, vigor and biomass of the plant.

[0231] Expressing a plurality of exogenous polynucleotides in a single host plant can be effected by co-introducing multiple nucleic acid constructs, each including a different exogenous polynucleotide, into a single plant cell. The transformed cell can then be regenerated into a mature plant using the methods described hereinabove. Alternatively, expressing a plurality of exogenous polynucleotides in a single host plant can be effected by co-introducing into a single plant-cell a single nucleic-acid construct including a plurality of different exogenous polynucleotides. Such a construct can be designed with a single promoter sequence which can transcribe a polycistronic messenger RNA including all the different exogenous polynucleotide sequences. Alternatively, the construct can include several promoter sequences each linked to a different exogenous polynucleotide sequence.

[0232] The plant cell transformed with the construct including a plurality of different exogenous polynucleotides can be regenerated into a mature plant, using the methods described hereinabove.

[0233] Alternatively, expressing a plurality of exogenous polynucleotides can be effected by introducing different nucleic acid constructs, including different exogenous polynucleotides, into a plurality of plants. The regenerated transformed plants can then be cross-bred and resultant progeny selected for superior yield or tolerance traits as described above, using conventional plant breeding techniques.

[0234] Expression of the miRNAs of the present invention or precursors thereof can be qualified using methods which are well known in the art such as those involving gene amplification e.g., PCR or RT-PCR or Northern blot or in-situ hybrdization.

[0235] According to some embodiments of the invention, the plant expressing the exogenous polynucleotide(s) is grown under stress (nitrogen or abiotic) or normal conditions (e.g., biotic conditions and/or conditions with sufficient water, nutrients such as nitrogen and fertilizer). Such conditions, which depend on the plant being grown, are known to those skilled in the art of agriculture, and are further, described above.

[0236] According to some embodiments of the invention, the method further comprises growing the plant expressing the exogenous polynucleotide(s) under abiotic stress or nitrogen limiting conditions. Non-limiting examples of abiotic stress conditions include, water deprivation, drought, excess of water (e.g., flood, waterlogging), freezing, low temperature, high temperature, strong winds, heavy metal toxicity, anaerobiosis, nutrient deficiency, nutrient excess, salinity, atmospheric pollution, intense light, insufficient light, or UV irradiation, etiolation and atmospheric pollution.

[0237] Thus, the invention encompasses plants exogenously expressing the polynucleotide(s), the nucleic acid constructs of the invention.

[0238] Methods of determining the level in the plant of the RNA transcribed from the exogenous polynucleotide are well known in the art and include, for example, Northern blot analysis, reverse transcription polymerase chain reaction (RT-PCR) analysis (including quantitative, semi-quantitative or real-time RT-PCR) and RNA-m situ hybridization.

[0239] The sequence information and annotations uncovered by the present teachings can be harnessed in favor of classical breeding. Thus, sub-sequence data of those polynucleotides described above, can be used as markers for marker assisted selection (MAS), in which a marker is used for indirect selection of a genetic determinant or determinants of a trait of interest (e.g., tolerance to abiotic stress). Nucleic acid data of the present teachings (DNA or RNA sequence) may contain or be linked to polymorphic sites or genetic markers on the genome such as restriction fragment length polymorphism (RFLP), microsatellites and single nucleotide polymorphism (SNP), DNA fingerprinting (DFP), amplified fragment length polymorphism (AFLP), expression level polymorphism, and any other polymorphism at the DNA or RNA sequence.

[0240] Examples of marker assisted selections include, but are not limited to, selection for a morphological trait (e.g., a gene that affects form, coloration, male sterility or resistance such as the presence or absence of awn, leaf sheath coloration, height, grain color, aroma of rice); selection for a biochemical trait (e.g., a gene that encodes a protein that can be extracted and observed; for example, isozymes and storage proteins); selection for a biological trait (e.g., pathogen races or insect biotypes based on host pathogen or host parasite interaction can be used as a marker since the genetic constitution of an organism can affect its susceptibility to pathogens or parasites).

[0241] The polynucleotides described hereinabove can be used in a wide range of economical plants, in a safe and cost effective manner.

[0242] Plant lines exogenously expressing the polynucleotide of the invention can be screened to identify those that show the greatest increase of the desired plant trait.

[0243] Thus, according to an additional embodiment of the present invention, there is provided a method of evaluating a trait of a plant, the method comprising: (a) expressing in a plant or a portion thereof the nucleic acid construct; and (b) evaluating a trait of a plant as compared to a wild type plant of the same type; thereby evaluating the trait of the plant.

[0244] Thus, the effect of the transgene (the exogenous polynucleotide) on different plant characteristics may be determined any method known to one of ordinary skill in the art.

[0245] Thus, for example, tolerance to limiting nitrogen conditions may be compared in transformed plants {i.e., expressing the transgene) compared to non-transformed (wild type) plants exposed to the same stress conditions (other stress conditions are contemplated as well, e.g. water deprivation, salt stress e.g. salinity, suboptimal temperatureosmotic stress, and the like), using the following assays.

[0246] Methods of qualifying plants as being tolerant or having improved tolerance to abiotic stress or limiting nitrogen levels are well known in the art and are further described hereinbelow.

[0247] Fertilizer use efficiency—To analyze whether the transgenic plants are more responsive to fertilizers, plants are grown in agar plates or pots with a limited amount of fertilizer, as described, for example, in Yanagisawa et al (Proc Natl Acad Sci USA. 2004; 101:7833-8). The plants are analyzed for their overall size, time to flowering, yield, protein content of shoot and/or grain. The parameters checked are the overall size of the mature plant, its wet and dry weight, the weight of the seeds yielded, the average seed size and the number of seeds produced per plant. Other parameters that may be tested are: the chlorophyll content of leaves (as nitrogen plant status and the degree of leaf verdure is highly correlated), amino acid and the total protein content of the seeds or other plant parts such as leaves or shoots, oil content, etc. Similarly, instead of providing nitrogen at limiting amounts, phosphate or potassium can be added at increasing concentrations. Again, the same parameters measured are the same as listed above. In this way, nitrogen use efficiency (NUE), phosphate use efficiency (PUE) and potassium use efficiency (KUE) are assessed, checking the ability of the transgenic plants to thrive under nutrient restraining conditions.

[0248] Nitrogen use efficiency—To analyze whether the transgenic plants (e.g., Arabidopsis plants) are more responsive to nitrogen, plant are grown in 0.75-3 millimolar (mM, nitrogen deficient conditions) or 10, 6-9 mM (optimal nitrogen concentration). Plants are allowed to grow for additional 25 days or until seed production. The plants are then analyzed for their overall size, time to flowering, yield, protein content of shoot and/or grain/seed production. The parameters checked can be the overall size of the plant, wet and dry weight, the weight of the seeds yielded, the average seed size and the number of seeds produced per plant. Other parameters that may be tested are: the chlorophyll content of leaves (as nitrogen plant status and the degree of leaf greenness is highly correlated), amino acid and the total protein content of the seeds or other plant parts such as leaves or shoots and oil content. Transformed plants not exhibiting substantial physiological and/or morphological effects, or exhibiting higher measured parameters levels than wild-type plants, are identified as nitrogen use efficient plants.

[0249] Nitrogen Use efficiency assay using plantlets—The assay is done according to Yanagisawa-S. et al. with minor modifications (“Metabolic engineering with Dofl transcription factor in plants: Improved nitrogen assimilation and growth under low-nitrogen conditions” Proc. Natl. Acad. Sci. USA 101, 7833-7838). Briefly, transgenic plants which are grown for 7-10 days in 0.5×MS [Murashige-Skoog] supplemented with a selection agent are transferred to two nitrogen-limiting conditions: MS media in which the combined nitrogen concentration (NH₄NO₃ and KNO₃) was 0.75 mM (nitrogen deficient conditions) or 6-15 mM (optimal nitrogen concentration). Plants are allowed to grow for additional 30-40 days and then photographed, individually removed from the Agar (the shoot without the roots) and immediately weighed (fresh weight) for later statistical analysis. Constructs for which only T1 seeds are available are sown on selective media and at least 20 seedlings (each one representing an independent transformation event) are carefully transferred to the nitrogen-limiting media. For constructs for which T2 seeds are available, different transformation events are analyzed. Usually, 20 randomly selected plants from each event are transferred to the nitrogen-limiting media allowed to grow for 3-4 additional weeks and individually weighed at the end of that period. Transgenic plants are compared to control plants grown in parallel under the same conditions. Mock-transgenic plants expressing the uidA reporter gene (GUS) under the same promoter or transgenic plants carrying the same promoter but lacking a reporter gene are used as control.

[0250] Nitrogen determination—The procedure for N (nitrogen) concentration determination in the structural parts of the plants involves the potassium persulfate digestion method to convert organic N to NO₃⁻ (Purcell and King 1996 Argon. J. 88:111-113, the modified Cd₃⁻ mediated reduction of NO₃⁻ to NO₂⁻ (Vodovotz 1996 Biotechniques 20:390-394) and the measurement of nitrite by the Griess assay (Vodovotz 1996, supra). The absorbance values are measured at 550 nm against a standard curve of NaNO₂. The procedure is described in details in Samonte et al. 2006 Agron. J. 98:168-176.

[0251] Tolerance to abiotic stress (e.g. tolerance to drought or salinity) can be evaluated by determining the differences in physiological and/or physical condition, including but not limited to, vigor, growth, size, or root length, or specifically, leaf color or leaf area size of the transgenic plant compared to a non-modified plant of the same species grown under the same conditions. Other techniques for evaluating tolerance to abiotic stress include, but are not limited to, measuring chlorophyll fluorescence, photosynthetic rates and gas exchange rates. Further assays for evaluating tolerance to abiotic stress are provided hereinbelow and in the Examples section which follows.

[0252] Drought tolerance assay—Soil-based drought screens are performed with plants overexpressing the polynucleotides detailed above. Seeds from control Arabidopsis plants, or other transgenic plants overexpressing nucleic acid of the invention are germinated and transferred to pots. Drought stress is obtained after irrigation is ceased. Transgenic and control plants are compared to each other when the majority of the control plants develop severe wilting. Plants are re-watered after obtaining a significant fraction of the control plants displaying a severe wilting. Plants are ranked comparing to controls for each of two criteria: tolerance to the drought conditions and recovery (survival) following re-watering.

[0253] Quantitative parameters of tolerance measured include, but are not limited to, the average wet and dry weight, growth rate, leaf size, leaf coverage (overall leaf area), the weight of the seeds yielded, the average seed size and the number of seeds produced per plant. Transformed plants not exhibiting substantial physiological and/or morphological effects, or exhibiting higher biomass than wild-type plants, are identified as drought stress tolerant plants

[0254] Salinity tolerance assay—Transgenic plants with tolerance to high salt concentrations are expected to exhibit better germination, seedling vigor or growth in high salt. Salt stress can be effected in many ways such as, for example, by irrigating the plants with a hyperosmotic solution, by cultivating the plants hydroponically in a hyperosmotic growth solution (e.g., Hoagland solution with added salt), or by culturing the plants in a hyperosmotic growth medium [e.g., 50% Murashige-Skoog medium (MS medium) with added salt]. Since different plants vary considerably in their tolerance to salinity, the salt concentration in the irrigation water, growth solution, or growth medium can be adjusted according to the specific characteristics of the specific plant cultivar or variety, so as to inflict a mild or moderate effect on the physiology and/or morphology of the plants (for guidelines as to appropriate concentration see, Bernstein and Kafkafi, Root Growth Under Salinity Stress In: Plant Roots, The Hidden Half 3rd ed. Waisel Y, Eshel A and Kafkafi U. (editors) Marcel Dekker Inc., New York, 2002, and reference therein).

[0255] For example, a salinity tolerance test can be performed by irrigating plants at different developmental stages with increasing concentrations of sodium chloride (for example 50 mM, 150 mM, 300 mM NaCl) applied from the bottom and from above to ensure even dispersal of salt. Following exposure to the stress condition the plants are frequently monitored until substantial physiological and/or morphological effects appear in wild type plants. Thus, the external phenotypic appearance, degree of chlorosis and overall success to reach maturity and yield progeny are compared between control and transgenic plants. Quantitative parameters of tolerance measured include, but are not limited to, the average wet and dry weight, growth rate, leaf size, leaf coverage (overall leaf area), the weight of the seeds yielded, the average seed size and the number of seeds produced per plant. Transformed plants not exhibiting substantial physiological and/or morphological effects, or exhibiting higher biomass than wild-type plants, are identified as abiotic stress tolerant plants.

[0256] Osmotic tolerance test—Osmotic stress assays (including sodium chloride and PEG assays) are conducted to determine if an osmotic stress phenotype was sodium chloride-specific or if it was a general osmotic stress related phenotype. Plants which are tolerant to osmotic stress may have more tolerance to drought and/or freezing. For salt and osmotic stress experiments, the medium is supplemented for example with 50 mM, 100 mM, 200 mM NaCl or 15%, 20% or 25% PEG.

[0257] Cold stress tolerance—One way to analyze cold stress is as follows. Mature (25 day old) plants are transferred to 4° C. chambers for 1 or 2 weeks, with constitutive light. Later on plants are moved back to greenhouse. Two weeks later damages from chilling period, resulting in growth retardation and other phenotypes, are compared between control and transgenic plants, by measuring plant weight (wet and dry), and by comparing growth rates measured as time to flowering, plant size, yield, and the like.

[0258] Heat stress tolerance—One way to measure heat stress tolerance is by exposing the plants to temperatures above 34° C. for a certain period. Plant tolerance is examined after transferring the plants back to 22° C. for recovery and evaluation after 5 days relative to internal controls (non-transgenic plants) or plants not exposed to neither cold or heat stress.

[0259] The biomass, vigor and yield of the plant can also be evaluated using any method known to one of ordinary skill in the art. Thus, for example, plant vigor can be calculated by the increase in growth parameters such as leaf area, fiber length, rosette diameter, plant fresh weight, oil content, seed yield and the like per time.

[0260] As mentioned, the increase of plant yield can be determined by various parameters. For example, increased yield of rice may be manifested by an increase in one or more of the following: number of plants per growing area, number of panicles per plant, number of spikelets per panicle, number of flowers per panicle, increase in the seed filling rate, increase in thousand kernel weight (1000-weight), increase oil content per seed, increase starch content per seed, among others. An increase in yield may also result in modified architecture, or may occur because of modified architecture. Similarly, increased yield of soybean may be manifested by an increase in one or more of the following: number of plants per growing area, number of pods per plant, number of seeds per pod, increase in the seed filling rate, increase in thousand seed weight (1000-weight), reduce pod shattering, increase oil content per seed, increase protein content per seed, among others. An increase in yield may also result in modified architecture, or may occur because of modified architecture.

[0261] Thus, the present invention is of high agricultural value for increasing tolerance of plants to nitrogen deficiency or abiotic stress as well as promoting the yield, biomass and vigor of commercially desired crops.

[0262] According to another embodiment of the present invention, there is provided a food or feed comprising the plants or a portion thereof of the present invention.

[0263] In a further aspect the invention, the transgenic plants of the present invention or parts thereof are comprised in a food or feed product (e.g., dry, liquid, paste). A food or feed product is any ingestible preparation containing the transgenic plants, or parts thereof, of the present invention, or preparations made from these plants. Thus, the plants or preparations are suitable for human (or animal) consumption, i.e. the transgenic plants or parts thereof are more readily digested. Feed products of the present invention further include a oil or a beverage adapted for animal consumption.

[0264] It will be appreciated that the transgenic plants, or parts thereof, of the present invention may be used directly as feed products or alternatively may be incorporated or mixed with feed products for consumption. Furthermore, the food or feed products may be processed or used as is. Exemplary feed products comprising the transgenic plants, or parts thereof, include, but are not limited to, grains, cereals, such as oats, e.g. black oats, barley, wheat, rye, sorghum, corn, vegetables, leguminous plants, especially soybeans, root vegetables and cabbage, or green forage, such as grass or hay.

[0265] It is expected that during the life of a patent maturing from this application many relevant homolog/ortholog sequences will be developed and the scope of the term polynucleotide/nucleic acid agent is intended to include all such new technologies a priori.

[0266] As used herein the term “about” refers to ±10%.

[0267] The terms “comprises”, “comprising”, “includes”, “including”, “having” and their conjugates mean “including but not limited to”.

[0268] The term “consisting of means “including and limited to”.

[0269] The term “consisting essentially of” means that the composition, method or structure may include additional ingredients, steps and/or parts, but only if the additional ingredients, steps and/or parts do not materially alter the basic and novel characteristics of the claimed composition, method or structure.

[0270] As used herein, the singular form “a”, “an” and “the” include plural references unless the context clearly dictates otherwise. For example, the term “a compound” or “at least one compound” may include a plurality of compounds, including mixtures thereof.

[0271] Throughout this application, various embodiments of this invention may be presented in a range format. It should be understood that the description in range format is merely for convenience and brevity and should not be construed as an inflexible limitation on the scope of the invention. Accordingly, the description of a range should be considered to have specifically disclosed all the possible subranges as well as individual numerical values within that range. For example, description of a range such as from 1 to 6 should be considered to have specifically disclosed subranges such as from 1 to 3, from 1 to 4, from 1 to 5, from 2 to 4, from 2 to 6, from 3 to 6 etc., as well as individual numbers within that range, for example, 1, 2, 3, 4, 5, and 6. This applies regardless of the breadth of the range.

[0272] Whenever a numerical range is indicated herein, it is meant to include any cited numeral (fractional or integral) within the indicated range. The phrases “ranging/ranges between” a first indicate number and a second indicate number and “ranging/ranges from” a first indicate number “to” a second indicate number are used herein interchangeably and are meant to include the first and second indicated numbers and all the fractional and integral numerals therebetween.

[0273] As used herein the term “method” refers to manners, means, techniques and procedures for accomplishing a given task including, but not limited to, those manners, means, techniques and procedures either known to, or readily developed from known manners, means, techniques and procedures by practitioners of the chemical, pharmacological, biological, biochemical and medical arts.

[0274] It is appreciated that certain features of the invention, which are, for clarity, described in the context of separate embodiments, may also be provided in combination in a single embodiment. Conversely, various features of the invention, which are, for brevity, described in the context of a single embodiment, may also be provided separately or in any suitable subcombination or as suitable in any other described embodiment of the invention. Certain features described in the context of various embodiments are not to be considered essential features of those embodiments, unless the embodiment is inoperative without those elements.

[0275] Various embodiments and aspects of the present invention as delineated hereinabove and as claimed in the claims section below find experimental support in the following examples.

### EXAMPLES

[0276] Reference is now made to the following examples, which together with the above descriptions illustrate some embodiments of the invention in a non limiting fashion.

[0277] Generally, the nomenclature used herein and the laboratory procedures utilized in the present invention include molecular, biochemical, microbiological and recombinant DNA techniques. Such techniques are thoroughly explained in the literature. See, for example, “Molecular Cloning: A laboratory Manual” Sambrook et al., (1989); “Current Protocols in Molecular Biology” Volumes I-III Ausubel, R. M., ed. (1994); Ausubel et al., “Current Protocols in Molecular Biology”, John Wiley and Sons, Baltimore, Md. (1989); Perbal, “A Practical Guide to Molecular Cloning”, John Wiley & Sons, New York (1988); Watson et al., “Recombinant DNA”, Scientific American Books, New York; Birren et al. (eds) “Genome Analysis: A Laboratory Manual Series”, Vols. 1-4, Cold Spring Harbor Laboratory Press, New York (1998); methodologies as set forth in U.S. Pat. Nos. 4,666,828; 4,683,202; 4,801,531; 5,192,659 and 5,272,057; “Cell Biology: A Laboratory Handbook”, Volumes I-III Cellis, J. E., ed. (1994); “Current Protocols in Immunology” Volumes I-III Coligan J. E., ed. (1994); Stites et al. (eds), “Basic and Clinical Immunology” (8th Edition), Appleton & Lange, Norwalk, Conn. (1994); Mishell and Shiigi (eds), “Selected Methods in Cellular Immunology”, W. H. Freeman and Co., New York (1980); available immunoassays are extensively described in the patent and scientific literature, see, for example, U.S. Pat. Nos. 3,791,932; 3,839,153; 3,850,752; 3,850,578; 3,853,987; 3,867,517; 3,879,262; 3,901,654; 3,935,074; 3,984,533; 3,996,345; 4,034,074; 4,098,876; 4,879,219; 5,011,771 and 5,281,521; “Oligonucleotide Synthesis” Gait, M. J., ed. (1984); “Nucleic Acid Hybridization” Hames, B. D., and Higgins S. J., eds. (1985); “Transcription and Translation” Hames, B. D., and Higgins S. J., Eds. (1984); “Animal Cell Culture” Freshney, R. I., ed. (1986); “Immobilized Cells and Enzymes” IRL Press, (1986); “A Practical Guide to Molecular Cloning” Perbal, B., (1984) and “Methods in Enzymology” Vol. 1-317, Academic Press; “PCR Protocols: A Guide To Methods And Applications”, Academic Press, San Diego, Calif. (1990); Marshak et al., “Strategies for Protein Purification and Characterization—A Laboratory Course Manual” CSHL Press (1996); all of which are incorporated by reference as if fully set forth herein. Other general references are provided throughout this document. The procedures therein are believed to be well known in the art and are provided for the convenience of the reader. All the information contained therein is incorporated herein by reference.

### Example 1

### Differential Expression of miRNAs in Maize Plant Under Optimal Versus Limited Nitrogen

[0278] Experimental Procedures

[0279] Plant Material

[0280] Corn seeds were obtained from Galil seeds (Israel). Corn variety 5605 was used in all experiments. Plants were grown at 28° C. under a 16 hr light:8 hr dark regime.

[0281] Stress Induction

[0282] Corn seeds were germinated and grown on defined growth media containing either sufficient (100% N₂) or insufficient nitrogen levels (1% or 10% N₂). Seedlings aged one or two weeks were used for tissue samples for RNA analysis, as described below.

[0283] Total RNA Extraction

[0284] Total RNA of leaf or root samples from four to eight biological repeats were extracted using the mirVana™ kit (Ambion, Austin, Tex.) by pooling 3-4 plants to one biological repeat.

[0285] Microarray Design

[0286] Custom microarrays were manufactured by Agilent Technologies by in situ synthesis. The first generation microarray consisted of a total of 13619 non-redundant DNA probes, the majority of which arose from deep sequencing data and includes different small RNA molecules (i.e. miRNAs, siRNA and predicted small RNA sequences), with each probe being printed once. An in-depth analysis of the first generation microarray, which included hybridization experiments as well as structure and orientation verifications on all its small RNAs, resulted in the formation of an improved, second generation, microarray. The second generation microarray consisted of a total 4721 non-redundant DNA 45-nucleotide long probes for all known plant small RNAs, with 912 sequences (19.32%) from Sanger version 15 and the rest (3809), encompassing miRNAs (968=20.5%), siRNAs (1626=34.44%) and predicted small RNA sequences (1215=25.74%), from deep sequencing data accumulated by the inventors, with each probe being printed in triplicate.

[0287] Results

[0288] Wild type maize plants were allowed to grow at standard, optimal conditions or nitrogen deficient conditions for one or two weeks, at the end of which they were evaluated for NUE. Three to four plants from each group were used for reproducibility. Four to eight repeats were obtained for each group, and RNA was extracted from leaf or root tissue. The expression level of the maize miRNAs was analyzed by high throughput microarray to identify miRNAs that were differentially expressed between the experimental groups.

[0289] Tables 1-2 below presents sequences that were found to be differentially expressed in corn grown in various nitrogen levels. To clarify, the sequence of an up-regulated miRNA is induced under nitrogen limiting conditions and the sequence of a down-regulated miRNA is repressed under nitrogen limiting conditions compared to optimal conditions.

TABLE 1
Differentially Expressed miRNAs in Leaf of Plants Growing
under Nitrogen Deficient Versus Optimal Conditions.

| | Fold | | | |
|---|---|---|---|---|
| P value - | Change - | | Up/Down | |
| Leaf | Leaf | Sequence/SEQ ID NO: | regulated | Small RNA name |
| 3.90E−03 | 1.66 | AGAAGAGAGAGAGTACAGCCT/1 | Down | Zma-miR529 |
| 3.30E−06 | 3.35 | TAGCCAGGGATGATTTGCCTG/2 | Down | Zma-miR1691 |
| ND | ND | GGAATCTTGATGATGCTGCAT/3 | Down | Zma-miR172e |
| ND | ND | GTGAAGTGTTTGGGGGAACTC/4 | Down | Zma-miR395b |
| 2.20E−07 | 2.51 | TAGCCAAGCATGATTTGCCCG/5 | Down | Predicted zma mir |
| | | | | 50601 |
| ND | ND | AGGATGTGAGGCTATTGGGGAC/6 | Up | Predicted zma mir |
| | | | | 48492 |
| ND | ND | CCAAGTCGAGGGCAGACCAGGC/7 | Up | Predicted zma mir |
| | | | | 48879 |
| ND | ND | ATTCACGGGGACGAACCTCCT/8 | Up | Mtr-miR2647a |
| 1.80E−02 | 1.72 | AGGATGCTGACGCAATGGGAT/9 | Up | Predicted zma mir |
| | | | | 48486 |
| 9.80E−03 | 1.61 | TTAGATGACCATCAGCAAACA/10 | Up | Zma-miR827 |

TABLE 2
Differentially Expressed miRNAs in Roots of Plants Growing
under Nitrogen Deficient Versus Optimal Conditions.

| | Fold | | | |
|---|---|---|---|---|
| P value - | Change - | | Up/Down | |
| Root | Root | Sequence/SEQ ID NO: | regulated | Small RNA name |
| ND | ND | AGAAGAGAGAGAGTACAGCCT/1 | Down | Zma-miR529 |
| 1.40E−05 | 2.56 | TAGCCAGGGATGATTTGCCTG/2 | Down | Zma-miR1691 |
| 5.40E−05 | 2.08 | GTGAAGTGTTTGGGGGAACTC/4 | Down | Zma-miR395b |
| 2.30E−04 | 1.66 | TAGCCAAGCATGATTTGCCCG/5 | Down | Predicted zma mir |
| | | | | 50601 |
| 4.50E−02 | 1.75 | GGAATCTTGATGATGCTGCAT/3 | Down | Zma-miR172e |
| 1.60E−02 | 1.8 | AGGATGCTGACGCAATGGGAT/9 | Up | Predicted zma mir |
| | | | | 48486 |
| ND | ND | TTAGATGACCATCAGCAAACA/10 | Up | Zma-miR827 |
| 1.30E−04 | 2.75 | AGGATGTGAGGCTATTGGGGAC/6 | Up | Predicted zma mir |
| | | | | 48492 |
| 5.60E−04 | 1.95 | CCAAGTCGAGGGCAGACCAGGC/7 | Up | Predicted zma mir |
| | | | | 48879 |
| 3.90E−02 | 1.79 | ATTCACGGGGACGAACCTCCT/8 | Up | Mtr-miR2647a |

### Example 2

### Identification of Homologous and Orthologous Sequences of Differential Small RNAs Associated with Increased NUE

[0290] The small RNA sequences of the invention that were either down- or upregulated under nitrogen limiting conditions were examined for homologous and orthologous sequences using the miRBase database (wwwdotmirbasedotorg/) and the Plant MicroRNA Database (PMRD, wwwdotbioinformaticsdotcaudotedudotcn/PMRD). The mature miRNA sequences that are homologous or orthologous to the miRNAs of the invention (listed in Table 1) are found using miRNA public databases, having at least 90% identity of the entire small RNA length, and are summarized in Table 3 below. Of note, if homologs of only 90% are uncovered, they are subject for family members search and are listed with a cutoff of 80% identity to the homolog sequence, not to the original maize miR.

TABLE 3
Summary of Homologs/Orthologs to NUE small RNA Probes
(upregulated)

| Homolog | | | | | Stem- | | | |
|---|---|---|---|---|---|---|---|---|
| Stem- | | | | | loop | | | |
| loop seq | % | Homolog | | Homolog | seq id | MiR | Mature | MiR |
| id no: | Identity | length | sequence | names | no: | length | sequence | Name |
| 38 | 1 | 21 | ATTCACGG | mtr- | 21 | 21 | ATTCAC | mtr- |
| | | | GGACGAAC | miR2647b | | | GGGGAC | miR2647a |
| | | | CTCCT/23 | | | | GAACCT | |
| | | | | | | | CCT/8 | |
| 39 | 1 | 21 | ATTCACGG | mtr- | | | | |
| | | | GGACGAAC | miR2647c | | | | |
| | | | CTCCT/24 | | | | | |
| 40 | 0.9 | 21 | TTAGATGA | aly- | 22 | 21 | TTAGAT | zma- |
| | | | CCATCAAC | miR827 | | | GACCAT | miR827 |
| | | | AAACG/25 | | | | CAGCAA | |
| | | | | | | | ACA/10 | |
| 41 | 0.9 | 21 | TTAGATGA | ath- | | | | |
| | | | CCATCAAC | miR827 | | | | |
| | | | AAACT/26 | | | | | |
| 42 | 1 | 21 | TTAGATGA | bdi- | | | | |
| | | | CCATCAGC | miR827 | | | | |
| | | | AAACA/27 | | | | | |
| 43 | 0.95 | 21 | TTAGATGA | csi- | | | | |
| | | | CCATCAAC | miR827 | | | | |
| | | | AAACA/28 | | | | | |
| 44 | 0.95 | 21 | TTAGATGA | ghr- | | | | |
| | | | CCATCAAC | miR827a | | | | |
| | | | AAACA/29 | | | | | |
| 45 | 0.95 | 21 | TTAGATGA | ghr- | | | | |
| | | | CCATCAAC | miR827b | | | | |
| | | | AAACA/30 | | | | | |
| 46 | 0.95 | 21 | TTAGATGA | ghr- | | | | |
| | | | CCATCAAC | miR827c | | | | |
| | | | AAACA/31 | | | | | |
| 47 | 0.86 | 21 | TAAGATGA | osa- | | | | |
| | | | CCATCAGC | miR827 | | | | |
| | | | GAAAA/32 | | | | | |
| 48 | 1 | 21 | TTAGATGA | osa- | | | | |
| | | | CCATCAGC | miR827a | | | | |
| | | | AAACA/33 | | | | | |
| 49 | 1 | 21 | TTAGATGA | osa- | | | | |
| | | | CCATCAGC | miR827b | | | | |
| | | | AAACA/34 | | | | | |
| 50 | 0.86 | 21 | TTAGATGA | ptc- | | | | |
| | | | CCATCAAC | miR827 | | | | |
| | | | GAAAA/35 | | | | | |
| 51 | 1 | 21 | TTAGATGA | ssp- | | | | |
| | | | CCATCAGC | miR827 | | | | |
| | | | AAACA/36 | | | | | |
| 52 | 0.95 | 21 | TTAGATGA | tcc- | | | | |
| | | | CCATCAAC | miR827 | | | | |
| | | | AAACA/37 | | | | | |

TABLE 4
Summary of Homologs/Orthologs to NUE small RNA Probes
(Downregulated)

| | | | | | Stem- | | | |
|---|---|---|---|---|---|---|---|---|
| | | | | | loop | | | |
| Homolog | | | | | seq | | | |
| Stem-loop | % | Homolog | | Homolog | id | MiR | Mature | MiR |
| seq id no: | Identity | length | sequence | names | no: | length | sequence | Name |
| 454 | 0.81 | 21 | CAGCCAAG | aly- | 53 | 21 | TAGCCA | zma- |
| | | | GATGACTT | miR169b | | | GGGATG | miR1691 |
| | | | GCCGG/57 | | | | ATTTGCC | |
| | | | | | | | TG/2 | |
| 455 | 0.81 | 21 | CAGCCAAG | aly- | | | | |
| | | | GATGACTT | miR169c | | | | |
| | | | GCCGG/58 | | | | | |
| 456 | 0.9 | 21 | TAGCCAAG | aly- | | | | |
| | | | GATGACTT | miR169h | | | | |
| | | | GCCTG/59 | | | | | |
| 457 | 0.9 | 21 | TAGCCAAG | aly- | | | | |
| | | | GATGACTT | miR169i | | | | |
| | | | GCCTG/60 | | | | | |
| 458 | 0.9 | 21 | TAGCCAAG | aly- | | | | |
| | | | GATGACTT | miR169j | | | | |
| | | | GCCTG/61 | | | | | |
| 459 | 0.9 | 21 | TAGCCAAG | aly- | | | | |
| | | | GATGACTT | miR169k | | | | |
| | | | GCCTG/62 | | | | | |
| 460 | 0.9 | 21 | TAGCCAAG | aly- | | | | |
| | | | GATGACTT | miR169l | | | | |
| | | | GCCTG/63 | | | | | |
| 461 | 0.9 | 21 | TAGCCAAG | aly- | | | | |
| | | | GATGACTT | miR169m | | | | |
| | | | GCCTG/64 | | | | | |
| 462 | 0.86 | 21 | TAGCCAAA | aly- | | | | |
| | | | GATGACTT | miR169n | | | | |
| | | | GCCTG/65 | | | | | |
| 463 | 0.86 | 21 | TAGCCAAG | aqc- | | | | |
| | | | GATGACTT | miR169a | | | | |
| | | | GCCTA/66 | | | | | |
| 464 | 0.9 | 21 | TAGCCAAG | aqc- | | | | |
| | | | GATGACTT | miR169b | | | | |
| | | | GCCTG/67 | | | | | |
| 465 | 0.81 | 21 | CAGCCAAG | aqc- | | | | |
| | | | GATGACTT | miR169c | | | | |
| | | | GCCGG/68 | | | | | |
| 466 | 0.86 | 21 | TAGCCAAG | ata- | | | | |
| | | | GATGAATT | miR169 | | | | |
| | | | GCCAG/69 | | | | | |
| 467 | 0.81 | 21 | CAGCCAAG | ath- | | | | |
| | | | GATGACTT | miR169b | | | | |
| | | | GCCGG/70 | | | | | |
| 468 | 0.81 | 21 | CAGCCAAG | ath- | | | | |
| | | | GATGACTT | miR169c | | | | |
| | | | GCCGG/71 | | | | | |
| 469 | 0.9 | 21 | TAGCCAAG | ath- | | | | |
| | | | GATGACTT | miR169h | | | | |
| | | | GCCTG/72 | | | | | |
| 470 | 0.9 | 21 | TAGCCAAG | ath- | | | | |
| | | | GATGACTT | miR169i | | | | |
| | | | GCCTG/73 | | | | | |
| 471 | 0.9 | 21 | TAGCCAAG | ath- | | | | |
| | | | GATGACTT | miR169j | | | | |
| | | | GCCTG/74 | | | | | |
| 472 | 0.9 | 21 | TAGCCAAG | ath- | | | | |
| | | | GATGACTT | miR169k | | | | |
| | | | GCCTG/75 | | | | | |
| 473 | 0.9 | 21 | TAGCCAAG | ath- | | | | |
| | | | GATGACTT | miR169l | | | | |
| | | | GCCTG/76 | | | | | |
| 474 | 0.9 | 21 | TAGCCAAG | ath- | | | | |
| | | | GATGACTT | miR169m | | | | |
| | | | GCCTG/77 | | | | | |
| 475 | 0.9 | 21 | TAGCCAAG | ath- | | | | |
| | | | GATGACTT | miR169n | | | | |
| | | | GCCTG/78 | | | | | |
| 476 | 0.86 | 21 | TAGCCAAG | bdi- | | | | |
| | | | GATGACTT | miR169b | | | | |
| | | | GCCGG/79 | | | | | |
| 477 | 0.81 | 21 | CAGCCAAG | bdi- | | | | |
| | | | GATGACTT | miR169c | | | | |
| | | | GCCGG/80 | | | | | |
| 478 | 0.81 | 21 | TAGCCAAG | bdi- | | | | |
| | | | AATGACTT | miR169d | | | | |
| | | | GCCTA/81 | | | | | |
| 479 | 0.9 | 21 | TAGCCAAG | bdi- | | | | |
| | | | GATGACTT | miR169e | | | | |
| | | | GCCTG/82 | | | | | |
| 480 | 0.81 | 21 | CAGCCAAG | bdi- | | | | |
| | | | GATGACTT | miR169f | | | | |
| | | | GCCGG/83 | | | | | |
| 481 | 0.9 | 21 | TAGCCAAG | bdi- | | | | |
| | | | GATGACTT | miR169g | | | | |
| | | | GCCTG/84 | | | | | |
| 482 | 0.86 | 21 | TAGCCAAG | bdi- | | | | |
| | | | GATGACTT | miR169h | | | | |
| | | | GCCTA/85 | | | | | |
| 483 | 0.81 | 21 | TAGCCAGG | bdi- | | | | |
| | | | AATGGCTT | miR169j | | | | |
| | | | GCCTA/86 | | | | | |
| 484 | 0.95 | 22 | TAGCCAAG | bdi- | | | | |
| | | | GATGATTT | miR169k | | | | |
| | | | GCCTGT/87 | | | | | |
| 485 | 0.86 | 21 | TAGCCAAG | bna- | | | | |
| | | | GATGACTT | miR169c | | | | |
| | | | GCCTA/88 | | | | | |
| 486 | 0.86 | 21 | TAGCCAAG | bna- | | | | |
| | | | GATGACTT | miR169d | | | | |
| | | | GCCTA/89 | | | | | |
| 487 | 0.86 | 21 | TAGCCAAG | bna- | | | | |
| | | | GATGACTT | miR169e | | | | |
| | | | GCCTA/90 | | | | | |
| 488 | 0.86 | 21 | TAGCCAAG | bna- | | | | |
| | | | GATGACTT | miR169f | | | | |
| | | | GCCTA/91 | | | | | |
| 489 | 0.9 | 22 | TAGCCAAG | bna- | | | | |
| | | | GATGACTT | miR169g | | | | |
| | | | GCCTGC/92 | | | | | |
| 490 | 0.9 | 22 | TAGCCAAG | bna- | | | | |
| | | | GATGACTT | miR169h | | | | |
| | | | GCCTGC/93 | | | | | |
| 491 | 0.9 | 22 | TAGCCAAG | bna- | | | | |
| | | | GATGACTT | miR169i | | | | |
| | | | GCCTGC/94 | | | | | |
| 492 | 0.9 | 22 | TAGCCAAG | bna- | | | | |
| | | | GATGACTT | miR169j | | | | |
| | | | GCCTGC/95 | | | | | |
| 493 | 0.9 | 22 | TAGCCAAG | bna- | | | | |
| | | | GATGACTT | miR169k | | | | |
| | | | GCCTGC/96 | | | | | |
| 494 | 0.9 | 22 | TAGCCAAG | bna- | | | | |
| | | | GATGACTT | miR169l | | | | |
| | | | GCCTGC/97 | | | | | |
| 495 | 0.86 | 21 | TAGCCAAG | far- | | | | |
| | | | GATGACTT | miR169 | | | | |
| | | | GCCTA/98 | | | | | |
| 496 | 0.9 | 21 | TAGCCAAG | ghb- | | | | |
| | | | GATGACTT | miR169a | | | | |
| | | | GCCTG/99 | | | | | |
| 497 | 0.81 | 21 | CAGCCAAG | gma- | | | | |
| | | | GATGACTT | miR169a | | | | |
| | | | GCCGG/100 | | | | | |
| 498 | 0.81 | 23 | TGAGCCAA | gma- | | | | |
| | | | GGATGACT | miR169d | | | | |
| | | | TGCCGGT/101 | | | | | |
| 499 | 0.81 | 20 | AGCCAAGG | gma- | | | | |
| | | | ATGACTTG | miR169e | | | | |
| | | | CCGG/102 | | | | | |
| 500 | 0.86 | 21 | AAGCCAAG | hvu- | | | | |
| | | | GATGAGTT | miR169 | | | | |
| | | | GCCTG/103 | | | | | |
| 501 | 0.81 | 21 | CAGCCAAG | mtr- | | | | |
| | | | GGTGATTT | miR169c | | | | |
| | | | GCCGG/104 | | | | | |
| 502 | 0.81 | 21 | AAGCCAAG | mtr- | | | | |
| | | | GATGACTT | miR169d | | | | |
| | | | GCCGG/105 | | | | | |
| 503 | 0.81 | 21 | AAGCCAAG | mtr- | | | | |
| | | | GATGACTT | miR169f | | | | |
| | | | GCCTA/106 | | | | | |
| 504 | 0.81 | 21 | CAGCCAAG | mtr- | | | | |
| | | | GATGACTT | miR169g | | | | |
| | | | GCCGG/107 | | | | | |
| 505 | 0.81 | 21 | CAGCCAAG | mtr- | | | | |
| | | | GATGACTT | miR169j | | | | |
| | | | GCCGG/108 | | | | | |
| 506 | 0.81 | 21 | CAGCCAAG | mtr- | | | | |
| | | | GGTGATTT | miR169k | | | | |
| | | | GCCGG/109 | | | | | |
| 507 | 0.81 | 21 | AAGCCAAG | mtr- | | | | |
| | | | GATGACTT | miR169l | | | | |
| | | | GCCGG/110 | | | | | |
| 508 | 0.81 | 21 | GAGCCAAG | mtr- | | | | |
| | | | GATGACTT | miR169m | | | | |
| | | | GCCGG/111 | | | | | |
| 509 | 0.81 | 21 | CAGCCAAG | osa- | | | | |
| | | | GATGACTT | miR169b | | | | |
| | | | GCCGG/112 | | | | | |
| 510 | 0.81 | 21 | CAGCCAAG | osa- | | | | |
| | | | GATGACTT | miR169c | | | | |
| | | | GCCGG/113 | | | | | |
| 511 | 0.86 | 21 | TAGCCAAG | osa- | | | | |
| | | | GATGAATT | miR169d | | | | |
| | | | GCCGG/114 | | | | | |
| 512 | 0.86 | 21 | TAGCCAAG | osa- | | | | |
| | | | GATGACTT | miR169e | | | | |
| | | | GCCGG/115 | | | | | |
| 513 | 0.86 | 21 | TAGCCAAG | osa- | | | | |
| | | | GATGACTT | miR169f | | | | |
| | | | GCCTA/116 | | | | | |
| 514 | 0.86 | 21 | TAGCCAAG | osa- | | | | |
| | | | GATGACTT | miR169g | | | | |
| | | | GCCTA/117 | | | | | |
| 515 | 0.9 | 21 | TAGCCAAG | osa- | | | | |
| | | | GATGACTT | miR169h | | | | |
| | | | GCCTG/118 | | | | | |
| 516 | 0.9 | 21 | TAGCCAAG | osa- | | | | |
| | | | GATGACTT | miR169i | | | | |
| | | | GCCTG/119 | | | | | |
| 517 | 0.9 | 21 | TAGCCAAG | osa- | | | | |
| | | | GATGACTT | miR169j | | | | |
| | | | GCCTG/120 | | | | | |
| 518 | 0.9 | 21 | TAGCCAAG | osa- | | | | |
| | | | GATGACTT | miR169k | | | | |
| | | | GCCTG/121 | | | | | |
| 519 | 0.9 | 21 | TAGCCAAG | osa- | | | | |
| | | | GATGACTT | miR169l | | | | |
| | | | GCCTG/122 | | | | | |
| 520 | 0.9 | 21 | TAGCCAAG | osa- | | | | |
| | | | GATGACTT | miR169m | | | | |
| | | | GCCTG/123 | | | | | |
| 521 | 0.81 | 21 | TAGCCAAG | osa- | | | | |
| | | | AATGACTT | miR169n | | | | |
| | | | GCCTA/124 | | | | | |
| 522 | 0.81 | 21 | TAGCCAAG | osa- | | | | |
| | | | AATGACTT | miR169o | | | | |
| | | | GCCTA/125 | | | | | |
| 523 | 0.81 | 21 | CAGCCAAG | ptc- | | | | |
| | | | GATGACTT | miR169d | | | | |
| | | | GCCGG/126 | | | | | |
| 524 | 0.81 | 21 | CAGCCAAG | ptc- | | | | |
| | | | GATGACTT | miR169e | | | | |
| | | | GCCGG/127 | | | | | |
| 525 | 0.81 | 21 | CAGCCAAG | ptc- | | | | |
| | | | GATGACTT | miR169f | | | | |
| | | | GCCGG/128 | | | | | |
| 526 | 0.81 | 21 | CAGCCAAG | ptc- | | | | |
| | | | GATGACTT | miR169g | | | | |
| | | | GCCGG/129 | | | | | |
| 527 | 0.81 | 21 | CAGCCAAG | ptc- | | | | |
| | | | GATGACTT | miR169h | | | | |
| | | | GCCGG/130 | | | | | |
| 528 | 0.9 | 21 | TAGCCAAG | ptc- | | | | |
| | | | GATGACTT | miR169i | | | | |
| | | | GCCTG/131 | | | | | |
| 529 | 0.9 | 21 | TAGCCAAG | ptc- | | | | |
| | | | GATGACTT | miR169j | | | | |
| | | | GCCTG/132 | | | | | |
| 530 | 0.9 | 21 | TAGCCAAG | ptc- | | | | |
| | | | GATGACTT | miR169k | | | | |
| | | | GCCTG/133 | | | | | |
| 531 | 0.9 | 21 | TAGCCAAG | ptc- | | | | |
| | | | GATGACTT | miR169l | | | | |
| | | | GCCTG/134 | | | | | |
| 532 | 0.9 | 21 | TAGCCAAG | ptc- | | | | |
| | | | GATGACTT | miR169m | | | | |
| | | | GCCTG/135 | | | | | |
| 533 | 0.86 | 21 | AAGCCAAG | ptc- | | | | |
| | | | GATGACTT | miR169o | | | | |
| | | | GCCTG/136 | | | | | |
| 534 | 0.86 | 21 | AAGCCAAG | ptc- | | | | |
| | | | GATGACTT | miR169p | | | | |
| | | | GCCTG/137 | | | | | |
| 535 | 0.86 | 21 | TAGCCAAG | ptc- | | | | |
| | | | GACGACTT | miR169q | | | | |
| | | | GCCTG/138 | | | | | |
| 536 | 0.86 | 21 | TAGCCAAG | ptc- | | | | |
| | | | GATGACTT | miR169r | | | | |
| | | | GCCTA/139 | | | | | |
| 537 | 0.81 | 21 | TAGCCAAG | ptc- | | | | |
| | | | GACGACTT | miR169u | | | | |
| | | | GCCTA/140 | | | | | |
| 538 | 0.81 | 21 | TAGCCAAG | ptc- | | | | |
| | | | GATGACTT | miR169v | | | | |
| | | | GCCCA/141 | | | | | |
| 539 | 0.81 | 21 | TAGCCAAG | ptc- | | | | |
| | | | GATGACTT | miR169w | | | | |
| | | | GCCCA/142 | | | | | |
| 540 | 0.81 | 21 | TAGCCAAG | ptc- | | | | |
| | | | GATGACTT | miR169x | | | | |
| | | | GCTCG/143 | | | | | |
| 541 | 0.9 | 21 | TAGCCATG | ptc- | | | | |
| | | | GATGAATT | miR169y | | | | |
| | | | GCCTG/144 | | | | | |
| 542 | 0.81 | 21 | CAGCCAAG | ptc- | | | | |
| | | | AATGATTT | miR169z | | | | |
| | | | GCCGG/145 | | | | | |
| 543 | 0.81 | 21 | CAGCCAAG | rco- | | | | |
| | | | GATGACTT | miR169a | | | | |
| | | | GCCGG/146 | | | | | |
| 544 | 0.81 | 21 | CAGCCAAG | rco- | | | | |
| | | | GATGACTT | miR169b | | | | |
| | | | GCCGG/147 | | | | | |
| 545 | 0.81 | 21 | CAGCCAAG | sbi- | | | | |
| | | | GATGACTT | miR169b | | | | |
| | | | GCCGG/148 | | | | | |
| 546 | 0.86 | 21 | TAGCCAAG | sbi- | | | | |
| | | | GATGACTT | miR169c | | | | |
| | | | GCCTA/149 | | | | | |
| 547 | 0.86 | 21 | TAGCCAAG | sbi- | | | | |
| | | | GATGACTT | miR169d | | | | |
| | | | GCCTA/150 | | | | | |
| 548 | 0.86 | 21 | TAGCCAAG | sbi- | | | | |
| | | | GATGACTT | miR169e | | | | |
| | | | GCCGG/151 | | | | | |
| 549 | 0.9 | 21 | TAGCCAAG | sbi- | | | | |
| | | | GATGACTT | miR169f | | | | |
| | | | GCCTG/152 | | | | | |
| 550 | 0.9 | 21 | TAGCCAAG | sbi- | | | | |
| | | | GATGACTT | miR169g | | | | |
| | | | GCCTG/153 | | | | | |
| 551 | 0.86 | 21 | TAGCCAAG | sbi- | | | | |
| | | | GATGACTT | miR169h | | | | |
| | | | GCCTA/154 | | | | | |
| 552 | 0.81 | 21 | TAGCCAAG | sbi- | | | | |
| | | | AATGACTT | miR169i | | | | |
| | | | GCCTA/155 | | | | | |
| 553 | 0.86 | 21 | TAGCCAAG | sbi- | | | | |
| | | | GATGACTT | miR169j | | | | |
| | | | GCCGG/156 | | | | | |
| 554 | 0.81 | 21 | CAGCCAAG | sbi- | | | | |
| | | | GATGACTT | miR169k | | | | |
| | | | GCCGG/157 | | | | | |
| 555 | 0.9 | 21 | TAGCCAAG | sbi- | | | | |
| | | | GATGACTT | miR169l | | | | |
| | | | GCCTG/158 | | | | | |
| 556 | 0.86 | 21 | TAGCCAAG | sbi- | | | | |
| | | | GATGACTT | miR169m | | | | |
| | | | GCCTA/159 | | | | | |
| 557 | 0.86 | 21 | TAGCCAAG | sbi- | | | | |
| | | | GATGACTT | miR169n | | | | |
| | | | GCCTA/160 | | | | | |
| 558 | 0.95 | 21 | TAGCCAAG | sbi- | | | | |
| | | | GATGATTT | miR169o | | | | |
| | | | GCCTG/161 | | | | | |
| 559 | 0.81 | 21 | CAGCCAAG | sly- | | | | |
| | | | GATGACTT | miR169a | | | | |
| | | | GCCGG/162 | | | | | |
| 560 | 0.9 | 21 | TAGCCAAG | sly- | | | | |
| | | | GATGACTT | miR169b | | | | |
| | | | GCCTG/163 | | | | | |
| 561 | 0.86 | 21 | TAGCCAAG | sly- | | | | |
| | | | GATGACTT | miR169d | | | | |
| | | | GCCTA/164 | | | | | |
| 562 | 0.86 | 21 | TAGCCAAG | ssp- | | | | |
| | | | GATGACTT | miR169 | | | | |
| | | | GCCGG/165 | | | | | |
| 563 | 0.81 | 21 | CAGCCAAG | tcc- | | | | |
| | | | GATGACTT | miR169b | | | | |
| | | | GCCGG/166 | | | | | |
| 564 | 0.86 | 21 | TAGCCAAG | tcc- | | | | |
| | | | GATGACTT | miR169d | | | | |
| | | | GCCTA/167 | | | | | |
| 565 | 0.81 | 21 | AAGCCAAG | tcc- | | | | |
| | | | AATGACTT | miR169f | | | | |
| | | | GCCTG/168 | | | | | |
| 566 | 0.9 | 21 | TAGCCAGG | tcc- | | | | |
| | | | GATGACTT | miR169g | | | | |
| | | | GCCTA/169 | | | | | |
| 567 | 0.9 | 21 | TAGCCAAG | tcc- | | | | |
| | | | GATGACTT | miR169h | | | | |
| | | | GCCTG/170 | | | | | |
| 568 | 0.9 | 21 | TAGCCAAG | tcc- | | | | |
| | | | GATGAGTT | miR169i | | | | |
| | | | GCCTG/171 | | | | | |
| 569 | 0.9 | 21 | TAGCCAAG | tcc- | | | | |
| | | | GATGACTT | miR169j | | | | |
| | | | GCCTG/172 | | | | | |
| 570 | 0.81 | 21 | CAGCCAAG | tcc- | | | | |
| | | | GATGACTT | miR169k | | | | |
| | | | GCCGG/173 | | | | | |
| 571 | 0.81 | 21 | CAGCCAAG | tcc- | | | | |
| | | | GATGACTT | miR169l | | | | |
| | | | GCCGG/174 | | | | | |
| 572 | 0.81 | 21 | CAGCCAAG | vvi- | | | | |
| | | | GATGACTT | miR169a | | | | |
| | | | GCCGG/175 | | | | | |
| 573 | 0.81 | 21 | CAGCCAAG | vvi- | | | | |
| | | | GATGACTT | miR169c | | | | |
| | | | GCCGG/176 | | | | | |
| 574 | 0.81 | 21 | CAGCCAAG | vvi- | | | | |
| | | | AATGATTT | miR169d | | | | |
| | | | GCCGG/177 | | | | | |
| 575 | 0.9 | 22 | TAGCCAAG | vvi- | | | | |
| | | | GATGACTT | miR169e | | | | |
| | | | GCCTGC/178 | | | | | |
| 576 | 0.81 | 21 | CAGCCAAG | vvi- | | | | |
| | | | GATGACTT | miR169j | | | | |
| | | | GCCGG/179 | | | | | |
| 577 | 0.81 | 21 | CAGCCAAG | vvi- | | | | |
| | | | GATGACTT | miR169k | | | | |
| | | | GCCGG/180 | | | | | |
| 578 | 0.81 | 21 | GAGCCAAG | vvi- | | | | |
| | | | GATGACTT | miR169m | | | | |
| | | | GCCGG/181 | | | | | |
| 579 | 0.81 | 21 | GAGCCAAG | vvi- | | | | |
| | | | GATGACTT | miR169n | | | | |
| | | | GCCGG/182 | | | | | |
| 580 | 0.81 | 21 | GAGCCAAG | vvi- | | | | |
| | | | GATGACTT | miR169p | | | | |
| | | | GCCGG/183 | | | | | |
| 581 | 0.81 | 21 | GAGCCAAG | vvi- | | | | |
| | | | GATGACTT | miR169q | | | | |
| | | | GCCGG/184 | | | | | |
| 582 | 0.81 | 21 | CAGCCAAG | vvi- | | | | |
| | | | GATGACTT | miR169s | | | | |
| | | | GCCGG/185 | | | | | |
| 583 | 0.81 | 21 | AAGCCAAG | vvi- | | | | |
| | | | GATGAATT | miR169v | | | | |
| | | | GCCGG/186 | | | | | |
| 584 | 0.81 | 21 | CAGCCAAG | vvi- | | | | |
| | | | GATGACTT | miR169w | | | | |
| | | | GCCGG/187 | | | | | |
| 585 | 0.86 | 21 | TAGCCAAG | vvi- | | | | |
| | | | GATGACTT | miR169x | | | | |
| | | | GCCTA/188 | | | | | |
| 586 | 0.81 | 21 | TAGCGAAG | vvi- | | | | |
| | | | GATGACTT | miR169y | | | | |
| | | | GCCTA/189 | | | | | |
| 587 | 0.81 | 21 | CAGCCAAG | zma- | | | | |
| | | | GATGACTT | miR169c | | | | |
| | | | GCCGG/190 | | | | | |
| 588 | 0.86 | 21 | TAGCCAAG | zma- | | | | |
| | | | GATGACTT | miR169f | | | | |
| | | | GCCTA/191 | | | | | |
| 589 | 0.86 | 21 | TAGCCAAG | zma- | | | | |
| | | | GATGACTT | miR169g | | | | |
| | | | GCCTA/192 | | | | | |
| 590 | 0.86 | 21 | TAGCCAAG | zma- | | | | |
| | | | GATGACTT | miR169h | | | | |
| | | | GCCTA/193 | | | | | |
| 591 | 0.9 | 21 | TAGCCAAG | zma- | | | | |
| | | | GATGACTT | miR169i | | | | |
| | | | GCCTG/194 | | | | | |
| 592 | 0.9 | 21 | TAGCCAAG | zma- | | | | |
| | | | GATGACTT | miR169j | | | | |
| | | | GCCTG/195 | | | | | |
| 593 | 0.9 | 21 | TAGCCAAG | zma- | | | | |
| | | | GATGACTT | miR169k | | | | |
| | | | GCCTG/196 | | | | | |
| 594 | 0.81 | 21 | TAGCCAAG | zma- | | | | |
| | | | AATGACTT | miR169o | | | | |
| | | | GCCTA/197 | | | | | |
| 595 | 0.86 | 21 | TAGCCAAG | zma- | | | | |
| | | | GATGACTT | miR169p | | | | |
| | | | GCCGG/198 | | | | | |
| 596 | 0.81 | 21 | CAGCCAAG | zma- | | | | |
| | | | GATGACTT | miR169r | | | | |
| | | | GCCGG/199 | | | | | |
| 597 | 0.95 | 21 | AGAATCTT | aly- | 54 | 21 | GGAATC | zma- |
| | | | GATGATGC | miR172a | | | TTGATG | miR172e |
| | | | TGCAT/200 | | | | ATGCTG | |
| | | | | | | | CAT/3 | |
| 598 | 0.95 | 21 | AGAATCTT | aly- | | | | |
| | | | GATGATGC | miR172b | | | | |
| | | | TGCAT/201 | | | | | |
| 599 | 0.9 | 21 | AGAATCTT | aly- | | | | |
| | | | GATGATGC | miR172c | | | | |
| | | | TGCAG/202 | | | | | |
| 600 | 0.9 | 21 | AGAATCTT | aly- | | | | |
| | | | GATGATGC | miR172d | | | | |
| | | | TGCAG/203 | | | | | |
| 601 | 0.95 | 20 | GAATCTTG | aly- | | | | |
| | | | ATGATGCT | miR172e | | | | |
| | | | GCAT/204 | | | | | |
| 602 | 0.95 | 21 | AGAATCTT | aqc- | | | | |
| | | | GATGATGC | miR172a | | | | |
| | | | TGCAT/205 | | | | | |
| 603 | 1 | 21 | GGAATCTT | aqc- | | | | |
| | | | GATGATGC | miR172b | | | | |
| | | | TGCAT/206 | | | | | |
| 604 | 0.86 | 21 | AGGATCTT | asp- | | | | |
| | | | GATGATGC | miR172 | | | | |
| | | | TGCAG/207 | | | | | |
| 605 | 0.95 | 23 | TGAGAATC | ata- | | | | |
| | | | TTGATGAT | miR172 | | | | |
| | | | GCTGCAT/208 | | | | | |
| 606 | 0.95 | 21 | AGAATCTT | ath- | | | | |
| | | | GATGATGC | miR172a | | | | |
| | | | TGCAT/209 | | | | | |
| 607 | 0.95 | 21 | AGAATCTT | ath- | | | | |
| | | | GATGATGC | miR172b | | | | |
| | | | TGCAT/210 | | | | | |
| 608 | 0.9 | 21 | AGAATCTT | ath- | | | | |
| | | | GATGATGC | miR172c | | | | |
| | | | TGCAG/211 | | | | | |
| 609 | 0.9 | 21 | AGAATCTT | ath- | | | | |
| | | | GATGATGC | miR172d | | | | |
| | | | TGCAG/212 | | | | | |
| 610 | 1 | 21 | GGAATCTT | ath- | | | | |
| | | | GATGATGC | miR172e | | | | |
| | | | TGCAT/213 | | | | | |
| 611 | 0.86 | 21 | AGAATCCT | ath- | | | | |
| | | | GATGATGC | miR172m | | | | |
| | | | TGCAG/214 | | | | | |
| 612 | 0.95 | 21 | AGAATCTT | bdi- | | | | |
| | | | GATGATGC | miR172a | | | | |
| | | | TGCAT/215 | | | | | |
| 613 | 1 | 21 | GGAATCTT | bdi- | | | | |
| | | | GATGATGC | miR172b | | | | |
| | | | TGCAT/216 | | | | | |
| 614 | 0.86 | 21 | AGAATCCT | bdi- | | | | |
| | | | GATGATGC | miR172d | | | | |
| | | | TGCAG/217 | | | | | |
| 615 | 0.95 | 21 | AGAATCTT | bol- | | | | |
| | | | GATGATGC | miR172a | | | | |
| | | | TGCAT/218 | | | | | |
| 616 | 0.95 | 21 | AGAATCTT | bol- | | | | |
| | | | GATGATGC | miR172b | | | | |
| | | | TGCAT/219 | | | | | |
| 617 | 0.95 | 21 | AGAATCTT | bra- | | | | |
| | | | GATGATGC | miR172a | | | | |
| | | | TGCAT/220 | | | | | |
| 618 | 0.95 | 21 | AGAATCTT | bra- | | | | |
| | | | GATGATGC | miR172b | | | | |
| | | | TGCAT/221 | | | | | |
| 619 | 0.9 | 20 | AGAATCTT | csi- | | | | |
| | | | GATGATGC | miR172 | | | | |
| | | | TGCA/222 | | | | | |
| 620 | 0.9 | 20 | AGAATCTT | csi- | | | | |
| | | | GATGATGC | miR172a | | | | |
| | | | TGCA/223 | | | | | |
| 621 | 0.86 | 21 | AGAATCTT | csi- | | | | |
| | | | GATGATGC | miR172b | | | | |
| | | | GGCAA/224 | | | | | |
| 622 | 0.95 | 22 | TGGAATCTT | csi- | | | | |
| | | | GATGATGC | miR172c | | | | |
| | | | TGCAG/225 | | | | | |
| 623 | 0.86 | 21 | AGAATCCT | ghr- | | | | |
| | | | GATGATGC | miR172 | | | | |
| | | | TGCAG/226 | | | | | |
| 624 | 0.95 | 21 | AGAATCTT | gma- | | | | |
| | | | GATGATGC | miR172a | | | | |
| | | | TGCAT/227 | | | | | |
| 625 | 0.95 | 21 | AGAATCTT | gma- | | | | |
| | | | GATGATGC | miR172b | | | | |
| | | | TGCAT/228 | | | | | |
| 626 | 0.95 | 21 | GGAATCTT | gma- | | | | |
| | | | GATGATGC | miR172c | | | | |
| | | | TGCAG/229 | | | | | |
| 627 | 0.95 | 24 | GGAATCTT | gma- | | | | |
| | | | GATGATGC | miR172d | | | | |
| | | | TGCAGCAG/ | | | | | |
| | | | 230 | | | | | |
| 628 | 0.95 | 24 | GGAATCTT | gma- | | | | |
| | | | GATGATGC | miR172e | | | | |
| | | | TGCAGCAG/ | | | | | |
| | | | 231 | | | | | |
| 629 | 0.9 | 20 | AGAATCTT | gma- | | | | |
| | | | GATGATGC | miR172f | | | | |
| | | | TGCA/232 | | | | | |
| 630 | 0.95 | 21 | AGAATCTT | gra- | | | | |
| | | | GATGATGC | miR172a | | | | |
| | | | TGCAT/233 | | | | | |
| 631 | 0.9 | 21 | AAAATCTT | gra- | | | | |
| | | | GATGATGC | miR172b | | | | |
| | | | TGCAT/234 | | | | | |
| 632 | 0.86 | 21 | AGAATCCT | hvv- | | | | |
| | | | GATGATGC | miR172a | | | | |
| | | | TGCAG/235 | | | | | |
| 633 | 0.86 | 21 | AGAATCCT | hvv- | | | | |
| | | | GATGATGC | miR172b | | | | |
| | | | TGCAG/236 | | | | | |
| 634 | 0.86 | 21 | AGAATCCT | hvv- | | | | |
| | | | GATGATGC | miR172c | | | | |
| | | | TGCAG/237 | | | | | |
| 635 | 0.86 | 21 | AGAATCCT | hvv- | | | | |
| | | | GATGATGC | miR172d | | | | |
| | | | TGCAG/238 | | | | | |
| 636 | 0.95 | 21 | AGAATCTT | mes- | | | | |
| | | | GATGATGC | miR172 | | | | |
| | | | TGCAT/239 | | | | | |
| 637 | 0.86 | 21 | AGAATCCT | mtr- | | | | |
| | | | GATGATGC | miR172 | | | | |
| | | | TGCAG/240 | | | | | |
| 638 | 0.9 | 21 | GGAATCTT | mtr- | | | | |
| | | | GATGATTCT | miR172a | | | | |
| | | | GCAC/241 | | | | | |
| 639 | 0.95 | 21 | AGAATCTT | osa- | | | | |
| | | | GATGATGC | miR172a | | | | |
| | | | TGCAT/242 | | | | | |
| 640 | 1 | 21 | GGAATCTT | osa- | | | | |
| | | | GATGATGC | miR172b | | | | |
| | | | TGCAT/243 | | | | | |
| 641 | 0.9 | 21 | TGAATCTTG | osa- | | | | |
| | | | ATGATGCT | miR172c | | | | |
| | | | GCAC/244 | | | | | |
| 642 | 0.95 | 21 | AGAATCTT | osa- | | | | |
| | | | GATGATGC | miR172d | | | | |
| | | | TGCAT/245 | | | | | |
| 643 | 0.86 | 21 | AGAATCCT | osa- | | | | |
| | | | GATGATGC | miR172m | | | | |
| | | | TGCAG/246 | | | | | |
| 644 | 0.86 | 21 | AGAATCCT | osa- | | | | |
| | | | GATGATGC | miR172n | | | | |
| | | | TGCAG/247 | | | | | |
| 645 | 0.86 | 21 | AGAATCCT | osa- | | | | |
| | | | GATGATGC | miR172o | | | | |
| | | | TGCAG/248 | | | | | |
| 646 | 0.86 | 21 | AGAATCCT | osa- | | | | |
| | | | GATGATGC | miR172p | | | | |
| | | | TGCAG/249 | | | | | |
| 647 | 0.86 | 21 | AGAATCCT | pga- | | | | |
| | | | GATGATGC | miR172 | | | | |
| | | | TGCAC/250 | | | | | |
| 648 | 0.95 | 21 | AGAATCTT | ppd- | | | | |
| | | | GATGATGC | miR172a | | | | |
| | | | TGCAT/251 | | | | | |
| 649 | 0.86 | 21 | TGAATCTTG | ppd- | | | | |
| | | | ATGATGCT | miR172b | | | | |
| | | | CCAC/252 | | | | | |
| 650 | 0.86 | 21 | AGAATCCT | psi- | | | | |
| | | | GATGATGC | miR172 | | | | |
| | | | TGCAC/253 | | | | | |
| 651 | 0.95 | 21 | AGAATCTT | ptc- | | | | |
| | | | GATGATGC | miR172a | | | | |
| | | | TGCAT/254 | | | | | |
| 652 | 0.95 | 21 | AGAATCTT | ptc- | | | | |
| | | | GATGATGC | miR172b | | | | |
| | | | TGCAT/255 | | | | | |
| 653 | 0.95 | 21 | AGAATCTT | ptc- | | | | |
| | | | GATGATGC | miR172c | | | | |
| | | | TGCAT/256 | | | | | |
| 654 | 1 | 21 | GGAATCTT | ptc- | | | | |
| | | | GATGATGC | miR172d | | | | |
| | | | TGCAT/257 | | | | | |
| 655 | 1 | 21 | GGAATCTT | ptc- | | | | |
| | | | GATGATGC | miR172e | | | | |
| | | | TGCAT/258 | | | | | |
| 656 | 0.95 | 21 | AGAATCTT | ptc- | | | | |
| | | | GATGATGC | miR172f | | | | |
| | | | TGCAT/259 | | | | | |
| 657 | 0.95 | 21 | GGAATCTT | ptc- | | | | |
| | | | GATGATGC | miR172g | | | | |
| | | | TGCAG/260 | | | | | |
| 658 | 0.95 | 21 | GGAATCTT | ptc- | | | | |
| | | | GATGATGC | miR172h | | | | |
| | | | TGCAG/261 | | | | | |
| 659 | 0.86 | 21 | AGAATCCT | ptc- | | | | |
| | | | GATGATGC | miR172i | | | | |
| | | | TGCAA/262 | | | | | |
| 660 | 0.95 | 21 | GGAATCTT | rco- | | | | |
| | | | GATGATGC | miR172 | | | | |
| | | | TGCAG/263 | | | | | |
| 661 | 0.9 | 20 | AGAATCTT | sbi- | | | | |
| | | | GATGATGC | miR172a | | | | |
| | | | TGCA/264 | | | | | |
| 662 | 0.95 | 20 | GGAATCTT | sbi- | | | | |
| | | | GATGATGC | miR172b | | | | |
| | | | TGCA/265 | | | | | |
| 663 | 0.9 | 20 | AGAATCTT | sbi- | | | | |
| | | | GATGATGC | miR172c | | | | |
| | | | TGCA/266 | | | | | |
| 664/847 | 0.9 | 20 | AGAATCTT | sbi- | | | | |
| | | | GATGATGC | miR172d | | | | |
| | | | TGCA/267 | | | | | |
| 665 | 0.9 | 21 | TGAATCTTG | sbi- | | | | |
| | | | ATGATGCT | miR172e | | | | |
| | | | GCAC/268 | | | | | |
| 666 | 0.86 | 21 | AGAATCCT | sbi- | | | | |
| | | | GATGATGC | miR172f | | | | |
| | | | TGCAC/269 | | | | | |
| 667 | 0.95 | 21 | AGAATCTT | sly- | | | | |
| | | | GATGATGC | miR172a | | | | |
| | | | TGCAT/270 | | | | | |
| 668 | 0.95 | 21 | AGAATCTT | sly- | | | | |
| | | | GATGATGC | miR172b | | | | |
| | | | TGCAT/271 | | | | | |
| 669 | 0.86 | 21 | AGAATCCT | sof- | | | | |
| | | | GATGATGC | miR172a | | | | |
| | | | TGCAG/272 | | | | | |
| 670 | 0.95 | 21 | AGAATCTT | stu- | | | | |
| | | | GATGATGC | miR172 | | | | |
| | | | TGCAT/273 | | | | | |
| 671 | 0.86 | 21 | AGAATCCT | tae- | | | | |
| | | | GATGATGC | miR172a | | | | |
| | | | TGCAG/274 | | | | | |
| 672 | 0.86 | 21 | AGAATCCT | tae- | | | | |
| | | | GATGATGC | miR172b | | | | |
| | | | TGCAG/275 | | | | | |
| 673 | 0.86 | 21 | AGGATCTT | tae- | | | | |
| | | | GATGATGC | miR172c | | | | |
| | | | TGCAG/276 | | | | | |
| 674 | 0.86 | 21 | AGAATCCT | tca- | | | | |
| | | | GATGATGC | miR172 | | | | |
| | | | TGCAG/277 | | | | | |
| 675 | 0.95 | 20 | GGAATCTT | tcc- | | | | |
| | | | GATGATGC | miR172a | | | | |
| | | | TGCA/278 | | | | | |
| 676 | 0.95 | 21 | AGAATCTT | tcc- | | | | |
| | | | GATGATGC | miR172b | | | | |
| | | | TGCAT/279 | | | | | |
| 677 | 1 | 21 | GGAATCTT | tcc- | | | | |
| | | | GATGATGC | miR172c | | | | |
| | | | TGCAT/280 | | | | | |
| 678 | 0.9 | 21 | AGAATCCT | tcc- | | | | |
| | | | GATGATGC | miR172d | | | | |
| | | | TGCAT/281 | | | | | |
| 679 | 0.95 | 21 | AGAATCTT | tcc- | | | | |
| | | | GATGATGC | miR172e | | | | |
| | | | TGCAT/282 | | | | | |
| 680 | 0.9 | 21 | TGAATCTTG | vvi- | | | | |
| | | | ATGATGCT | miR172a | | | | |
| | | | ACAT/283 | | | | | |
| 681 | 0.86 | 21 | TGAATCTTG | vvi- | | | | |
| | | | ATGATGCT | miR172b | | | | |
| | | | ACAC/284 | | | | | |
| 682 | 0.95 | 21 | GGAATCTT | vvi- | | | | |
| | | | GATGATGC | miR172c | | | | |
| | | | TGCAG/285 | | | | | |
| 683 | 0.95 | 23/21 | TGAGAATC | vvi- | | | | |
| | | | TTGATGAT | miR172d | | | | |
| | | | GCTGCAT/286/ | | | | | |
| | | | AGAATCT | | | | | |
| | | | TGATGATG | | | | | |
| | | | CTGCAT/450 | | | | | |
| 684/848 | 0.9 | 20 | AGAATCTT | zma- | | | | |
| | | | GATGATGC | miR172a | | | | |
| | | | TGCA/287 | | | | | |
| 685 | 0.9 | 20 | AGAATCTT | zma- | | | | |
| | | | GATGATGC | miR172b | | | | |
| | | | TGCA/288 | | | | | |
| 686 | 0.9 | 20 | AGAATCTT | zma- | | | | |
| | | | GATGATGC | miR172c | | | | |
| | | | TGCA/289 | | | | | |
| 687 | 0.9 | 20 | AGAATCTT | zma- | | | | |
| | | | GATGATGC | miR172d | | | | |
| | | | TGCA/290 | | | | | |
| 688 | 1 | 21 | GGAATCTT | zma- | | | | |
| | | | GATGATGC | miR172f | | | | |
| | | | TGCAT/291 | | | | | |
| 689 | 0.86 | 21 | AGAATCCT | zma- | | | | |
| | | | GATGATGC | miR172m | | | | |
| | | | TGCAG/292 | | | | | |
| 690 | 0.9 | 21 | AGAATCCT | zma- | | | | |
| | | | GATGATGC | miR172n | | | | |
| | | | TGCAT/293 | | | | | |
| 691 | 0.9 | 21 | CTGAAGTG | aly- | 55 | 21 | GTGAAG | zma- |
| | | | TTTGGGGG | miR395b | | | TGTTTGG | miR395b |
| | | | GACTC/294 | | | | GGGAAC | |
| | | | | | | | TC/4 | |
| 692 | 0.86 | 21 | CTGAAGTG | aly- | | | | |
| | | | TTTGGGGG | miR395c | | | | |
| | | | GACTT/295 | | | | | |
| 693 | 0.95 | 21 | CTGAAGTG | aly- | | | | |
| | | | TTTGGGGG | miR395d | | | | |
| | | | AACTC/296 | | | | | |
| 694 | 0.95 | 21 | CTGAAGTG | aly- | | | | |
| | | | TTTGGGGG | miR395e | | | | |
| | | | AACTC/297 | | | | | |
| 695 | 0.9 | 21 | CTGAAGTG | aly- | | | | |
| | | | TTTGGGGG | miR395f | | | | |
| | | | GACTC/298 | | | | | |
| 696 | 0.95 | 21 | CTGAAGTG | aly- | | | | |
| | | | TTTGGGGG | miR395g | | | | |
| | | | AACTC/299 | | | | | |
| 697 | 0.9 | 21 | CTGAAGTG | aly- | | | | |
| | | | TTTGGGGG | miR395h | | | | |
| | | | GACTC/300 | | | | | |
| 698 | 0.9 | 21 | CTGAAGTG | aly- | | | | |
| | | | TTTGGAGG | miR395i | | | | |
| | | | AACTC/301 | | | | | |
| 699 | 0.86 | 21 | CTGAAGGG | aqc- | | | | |
| | | | TTTGGAGG | miR395a | | | | |
| | | | AACTC/302 | | | | | |
| 700 | 0.86 | 21 | CTGAAGGG | aqc- | | | | |
| | | | TTTGGAGG | miR395b | | | | |
| | | | AACTC/303 | | | | | |
| 701 | 0.95 | 21 | CTGAAGTG | ath- | | | | |
| | | | TTTGGGGG | miR395a | | | | |
| | | | AACTC/304 | | | | | |
| 702 | 0.9 | 21 | CTGAAGTG | ath- | | | | |
| | | | TTTGGGGG | miR395b | | | | |
| | | | GACTC/305 | | | | | |
| 703 | 0.9 | 21 | CTGAAGTG | ath- | | | | |
| | | | TTTGGGGG | miR395c | | | | |
| | | | GACTC/306 | | | | | |
| 704 | 0.95 | 21 | CTGAAGTG | ath- | | | | |
| | | | TTTGGGGG | miR395d | | | | |
| | | | AACTC/307 | | | | | |
| 705 | 0.95 | 21 | CTGAAGTG | ath- | | | | |
| | | | TTTGGGGG | miR395e | | | | |
| | | | AACTC/308 | | | | | |
| 706 | 0.9 | 21 | CTGAAGTG | ath- | | | | |
| | | | TTTGGGGG | miR395f | | | | |
| | | | GACTC/309 | | | | | |
| 707 | 0.95 | 20 | TGAAGTGT | bdi- | | | | |
| | | | TTGGGGGA | miR395a | | | | |
| | | | ACTC/310 | | | | | |
| 708 | 0.95 | 20 | TGAAGTGT | bdi- | | | | |
| | | | TTGGGGGA | miR395b | | | | |
| | | | ACTC/311 | | | | | |
| 709 | 0.95 | 20 | TGAAGTGT | bdi- | | | | |
| | | | TTGGGGGA | miR395c | | | | |
| | | | ACTC/312 | | | | | |
| 710 | 0.81 | 21 | AAGTGTTT | bdi- | | | | |
| | | | GGGGAACT | miR395d | | | | |
| | | | CTAGG/313 | | | | | |
| 711 | 0.95 | 20 | TGAAGTGT | bdi- | | | | |
| | | | TTGGGGGA | miR395e | | | | |
| | | | ACTC/314 | | | | | |
| 712 | 0.95 | 20 | TGAAGTGT | bdi- | | | | |
| | | | TTGGGGGA | miR395f | | | | |
| | | | ACTC/315 | | | | | |
| 713 | 0.95 | 20 | TGAAGTGT | bdi- | | | | |
| | | | TTGGGGGA | miR395g | | | | |
| | | | ACTC/316 | | | | | |
| 714 | 0.95 | 20 | TGAAGTGT | bdi- | | | | |
| | | | TTGGGGGA | miR395h | | | | |
| | | | ACTC/317 | | | | | |
| 715 | 0.95 | 20 | TGAAGTGT | bdi- | | | | |
| | | | TTGGGGGA | miR395i | | | | |
| | | | ACTC/318 | | | | | |
| 716 | 0.95 | 20 | TGAAGTGT | bdi- | | | | |
| | | | TTGGGGGA | miR395j | | | | |
| | | | ACTC/319 | | | | | |
| 717 | 0.95 | 20 | TGAAGTGT | bdi- | | | | |
| | | | TTGGGGGA | miR395k | | | | |
| | | | ACTC/320 | | | | | |
| 718 | 0.95 | 20 | TGAAGTGT | bdi- | | | | |
| | | | TTGGGGGA | miR395l | | | | |
| | | | ACTC/321 | | | | | |
| 719 | 0.95 | 20 | TGAAGTGT | bdi- | | | | |
| | | | TTGGGGGA | miR395m | | | | |
| | | | ACTC/322 | | | | | |
| 720 | 0.95 | 20 | TGAAGTGT | bdi- | | | | |
| | | | TTGGGGGA | miR395n | | | | |
| | | | ACTC/323 | | | | | |
| 721 | 0.95 | 21 | CTGAAGTG | csi- | | | | |
| | | | TTTGGGGG | miR395 | | | | |
| | | | AACTC/324 | | | | | |
| 722 | 0.9 | 21 | TTGAAGTG | ghr- | | | | |
| | | | TTTGGGGG | miR395a | | | | |
| | | | AACTT/325 | | | | | |
| 723 | 0.86 | 21 | CTAAAGTG | ghr- | | | | |
| | | | TTTAGGGG | miR395c | | | | |
| | | | AACTC/326 | | | | | |
| 724 | 0.95 | 21 | CTGAAGTG | ghr- | | | | |
| | | | TTTGGGGG | miR395d | | | | |
| | | | AACTC/327 | | | | | |
| 725 | 0.95 | 21 | ATGAAGTG | gma- | | | | |
| | | | TTTGGGGG | miR395 | | | | |
| | | | AACTC/328 | | | | | |
| 726 | 0.95 | 21 | ATGAAGTG | mtr- | | | | |
| | | | TTTGGGGG | miR395a | | | | |
| | | | AACTC/329 | | | | | |
| 727 | 0.9 | 21 | ATGAAGTA | mtr- | | | | |
| | | | TTTGGGGG | miR395b | | | | |
| | | | AACTC/330 | | | | | |
| 728 | 0.95 | 21 | ATGAAGTG | mtr- | | | | |
| | | | TTTGGGGG | miR395c | | | | |
| | | | AACTC/331 | | | | | |
| 729 | 0.95 | 21 | ATGAAGTG | mtr- | | | | |
| | | | TTTGGGGG | miR395d | | | | |
| | | | AACTC/332 | | | | | |
| 730 | 0.95 | 21 | ATGAAGTG | mtr- | | | | |
| | | | TTTGGGGG | miR395e | | | | |
| | | | AACTC/333 | | | | | |
| 731 | 0.95 | 21 | ATGAAGTG | mtr- | | | | |
| | | | TTTGGGGG | miR395f | | | | |
| | | | AACTC/334 | | | | | |
| 732 | 0.95 | 21 | TTGAAGTG | mtr- | | | | |
| | | | TTTGGGGG | miR395g | | | | |
| | | | AACTC/335 | | | | | |
| 733 | 0.9 | 21 | ATGAAGTG | mtr- | | | | |
| | | | TTTGGGGG | miR395h | | | | |
| | | | AACTT/336 | | | | | |
| 734 | 0.95 | 21 | ATGAAGTG | mtr- | | | | |
| | | | TTTGGGGG | miR395i | | | | |
| | | | AACTC/337 | | | | | |
| 735 | 0.95 | 21 | ATGAAGTG | mtr- | | | | |
| | | | TTTGGGGG | miR395j | | | | |
| | | | AACTC/338 | | | | | |
| 736 | 0.95 | 21 | ATGAAGTG | mtr- | | | | |
| | | | TTTGGGGG | miR395k | | | | |
| | | | AACTC/339 | | | | | |
| 737 | 0.95 | 21 | ATGAAGTG | mtr- | | | | |
| | | | TTTGGGGG | miR395l | | | | |
| | | | AACTC/340 | | | | | |
| 738 | 0.95 | 21 | ATGAAGTG | mtr- | | | | |
| | | | TTTGGGGG | miR395m | | | | |
| | | | AACTC/341 | | | | | |
| 739 | 0.95 | 21 | ATGAAGTG | mtr- | | | | |
| | | | TTTGGGGG | miR395n | | | | |
| | | | AACTC/342 | | | | | |
| 740 | 0.95 | 21 | ATGAAGTG | mtr- | | | | |
| | | | TTTGGGGG | miR395o | | | | |
| | | | AACTC/343 | | | | | |
| 741 | 0.9 | 21 | TTGAAGCG | mtr- | | | | |
| | | | TTTGGGGG | miR395p | | | | |
| | | | AACTC/344 | | | | | |
| 742 | 0.95 | 21 | ATGAAGTG | mtr- | | | | |
| | | | TTTGGGGG | miR395q | | | | |
| | | | AACTC/345 | | | | | |
| 743 | 0.95 | 21 | ATGAAGTG | mtr- | | | | |
| | | | TTTGGGGG | miR395r | | | | |
| | | | AACTC/346 | | | | | |
| 744 | 0.95 | 21 | GTGAAGTG | osa- | | | | |
| | | | CTTGGGGG | miR395a | | | | |
| | | | AACTC/347 | | | | | |
| 745 | 0.9 | 20 | TGAAGTGC | osa- | | | | |
| | | | TTGGGGGA | miR395a.2 | | | | |
| | | | ACTC/348 | | | | | |
| 746 | 1 | 21 | GTGAAGTG | osa- | | | | |
| | | | TTTGGGGG | miR395b | | | | |
| | | | AACTC/349 | | | | | |
| 747 | 0.95 | 21 | GTGAAGTG | osa- | | | | |
| | | | TTTGGAGG | miR395c | | | | |
| | | | AACTC/350 | | | | | |
| 748 | 1 | 21 | GTGAAGTG | osa- | | | | |
| | | | TTTGGGGG | miR395d | | | | |
| | | | AACTC/351 | | | | | |
| 749 | 1 | 21 | GTGAAGTG | osa- | | | | |
| | | | TTTGGGGG | miR395e | | | | |
| | | | AACTC/352 | | | | | |
| 750 | 0.95 | 21 | GTGAATTG | osa- | | | | |
| | | | TTTGGGGG | miR395f | | | | |
| | | | AACTC/353 | | | | | |
| 751 | 1 | 21 | GTGAAGTG | osa- | | | | |
| | | | TTTGGGGG | miR395g | | | | |
| | | | AACTC/354 | | | | | |
| 752 | 1 | 21 | GTGAAGTG | osa- | | | | |
| | | | TTTGGGGG | miR395h | | | | |
| | | | AACTC/355 | | | | | |
| 753 | 1 | 21 | GTGAAGTG | osa- | | | | |
| | | | TTTGGGGG | miR395i | | | | |
| | | | AACTC/356 | | | | | |
| 754 | 1 | 21 | GTGAAGTG | osa- | | | | |
| | | | TTTGGGGG | miR395j | | | | |
| | | | AACTC/357 | | | | | |
| 755 | 1 | 21 | GTGAAGTG | osa- | | | | |
| | | | TTTGGGGG | miR395k | | | | |
| | | | AACTC/358 | | | | | |
| 756 | 1 | 21 | GTGAAGTG | osa- | | | | |
| | | | TTTGGGGG | miR395l | | | | |
| | | | AACTC/359 | | | | | |
| 757 | 1 | 21 | GTGAAGTG | osa- | | | | |
| | | | TTTGGGGG | miR395m | | | | |
| | | | AACTC/360 | | | | | |
| 758 | 1 | 21 | GTGAAGTG | osa- | | | | |
| | | | TTTGGGGG | miR395n | | | | |
| | | | AACTC/361 | | | | | |
| 759 | 0.9 | 21 | ATGAAGTG | osa- | | | | |
| | | | TTTGGAGG | miR395o | | | | |
| | | | AACTC/362 | | | | | |
| 760 | 1 | 21 | GTGAAGTG | osa- | | | | |
| | | | TTTGGGGG | miR395p | | | | |
| | | | AACTC/363 | | | | | |
| 761 | 1 | 21 | GTGAAGTG | osa- | | | | |
| | | | TTTGGGGG | miR395q | | | | |
| | | | AACTC/364 | | | | | |
| 762 | 1 | 21 | GTGAAGTG | osa- | | | | |
| | | | TTTGGGGG | miR395r | | | | |
| | | | AACTC/365 | | | | | |
| 763 | 1 | 21 | GTGAAGTG | osa- | | | | |
| | | | TTTGGGGG | miR395s | | | | |
| | | | AACTC/366 | | | | | |
| 764 | 0.95 | 21 | GTGAAGTG | osa- | | | | |
| | | | TTTGGGGA | miR395t | | | | |
| | | | AACTC/367 | | | | | |
| 765 | 0.9 | 21 | GTGAAGCG | osa- | | | | |
| | | | TTTGGGGG | miR395u | | | | |
| | | | AAATC/368 | | | | | |
| 766 | 0.9 | 21 | GTGAAGTA | osa- | | | | |
| | | | TTTGGCGG | miR395v | | | | |
| | | | AACTC/369 | | | | | |
| 767 | 0.81 | 22 | GTGAAGTG | osa- | | | | |
| | | | TTTGGGGG | miR395w | | | | |
| | | | ATTCTC/370 | | | | | |
| 768 | 0.86 | 21 | GTGAAGTG | osa- | | | | |
| | | | TTTGGAGT | miR395x | | | | |
| | | | AGCTC/371 | | | | | |
| 769 | 1 | 21 | GTGAAGTG | osa- | | | | |
| | | | TTTGGGGG | miR395y | | | | |
| | | | AACTC/372 | | | | | |
| 770 | 0.86 | 21 | CTGAAGTG | pab- | | | | |
| | | | TTTGGAGG | miR395 | | | | |
| | | | AACTT/373 | | | | | |
| 771 | 0.86 | 21 | CTGAAGGG | ptc- | | | | |
| | | | TTTGGAGG | miR395a | | | | |
| | | | AACTC/374 | | | | | |
| 772 | 0.95 | 21 | CTGAAGTG | ptc- | | | | |
| | | | TTTGGGGG | miR395b | | | | |
| | | | AACTC/375 | | | | | |
| 773 | 0.95 | 21 | CTGAAGTG | ptc- | | | | |
| | | | TTTGGGGG | miR395c | | | | |
| | | | AACTC/376 | | | | | |
| 774 | 0.95 | 21 | CTGAAGTG | ptc- | | | | |
| | | | TTTGGGGG | miR395d | | | | |
| | | | AACTC/377 | | | | | |
| 775 | 0.95 | 21 | CTGAAGTG | ptc- | | | | |
| | | | TTTGGGGG | miR395e | | | | |
| | | | AACTC/378 | | | | | |
| 776 | 0.95 | 21 | CTGAAGTG | ptc- | | | | |
| | | | TTTGGGGG | miR395f | | | | |
| | | | AACTC/379 | | | | | |
| 777 | 0.95 | 21 | CTGAAGTG | ptc- | | | | |
| | | | TTTGGGGG | miR395g | | | | |
| | | | AACTC/380 | | | | | |
| 778 | 0.95 | 21 | CTGAAGTG | ptc- | | | | |
| | | | TTTGGGGG | miR395h | | | | |
| | | | AACTC/381 | | | | | |
| 779 | 0.95 | 21 | CTGAAGTG | ptc- | | | | |
| | | | TTTGGGGG | miR395i | | | | |
| | | | AACTC/382 | | | | | |
| 780 | 0.95 | 21 | CTGAAGTG | ptc- | | | | |
| | | | TTTGGGGG | miR395j | | | | |
| | | | AACTC/383 | | | | | |
| 781 | 0.95 | 21 | CTGAAGTG | rco- | | | | |
| | | | TTTGGGGG | miR395a | | | | |
| | | | AACTC/384 | | | | | |
| 782 | 0.95 | 21 | CTGAAGTG | rco- | | | | |
| | | | TTTGGGGG | miR395b | | | | |
| | | | AACTC/385 | | | | | |
| 783 | 0.95 | 21 | CTGAAGTG | rco- | | | | |
| | | | TTTGGGGG | miR395c | | | | |
| | | | AACTC/386 | | | | | |
| 784 | 0.95 | 21 | CTGAAGTG | rco- | | | | |
| | | | TTTGGGGG | miR395d | | | | |
| | | | AACTC/387 | | | | | |
| 785 | 0.95 | 21 | CTGAAGTG | rco- | | | | |
| | | | TTTGGGGG | miR395e | | | | |
| | | | AACTC/388 | | | | | |
| 786 | 1 | 21 | GTGAAGTG | sbi- | | | | |
| | | | TTTGGGGG | miR395a | | | | |
| | | | AACTC/389 | | | | | |
| 787 | 1 | 21 | GTGAAGTG | sbi- | | | | |
| | | | TTTGGGGG | miR395b | | | | |
| | | | AACTC/390 | | | | | |
| 788/849 | 1 | 21 | GTGAAGTG | sbi- | | | | |
| | | | TTTGGGGG | miR395c | | | | |
| | | | AACTC/391 | | | | | |
| 789/850 | 1 | 21 | GTGAAGTG | sbi- | | | | |
| | | | TTTGGGGG | miR395d | | | | |
| | | | AACTC/392 | | | | | |
| 790 | 1 | 21 | GTGAAGTG | sbi- | | | | |
| | | | TTTGGGGG | miR395e | | | | |
| | | | AACTC/393 | | | | | |
| 791 | 0.95 | 21 | ATGAAGTG | sbi- | | | | |
| | | | TTTGGGGG | miR395f | | | | |
| | | | AACTC/394 | | | | | |
| 792 | 1 | 21 | GTGAAGTG | sbi- | | | | |
| | | | TTTGGGGG | miR395g | | | | |
| | | | AACTC/395 | | | | | |
| 793 | 1 | 21 | GTGAAGTG | sbi- | | | | |
| | | | TTTGGGGG | miR395h | | | | |
| | | | AACTC/396 | | | | | |
| 794 | 1 | 21 | GTGAAGTG | sbi- | | | | |
| | | | TTTGGGGG | miR395i | | | | |
| | | | AACTC/397 | | | | | |
| 795 | 1 | 21 | GTGAAGTG | sbi- | | | | |
| | | | TTTGGGGG | miR395j | | | | |
| | | | AACTC/398 | | | | | |
| 796 | 0.95 | 21 | GTGAAGTG | sbi- | | | | |
| | | | TTTGGAGG | miR395k | | | | |
| | | | AACTC/399 | | | | | |
| 797 | 0.95 | 21 | GTGAAGTG | sbi- | | | | |
| | | | CTTGGGGG | miR395l | | | | |
| | | | AACTC/400 | | | | | |
| 798 | 0.95 | 21 | CTGAAGTG | sde- | | | | |
| | | | TTTGGGGG | miR395 | | | | |
| | | | AACTC/401 | | | | | |
| 799 | 0.95 | 22 | CTGAAGTG | sly- | | | | |
| | | | TTTGGGGG | miR395a | | | | |
| | | | AACTCC/402 | | | | | |
| 800 | 0.95 | 22 | CTGAAGTG | sly- | | | | |
| | | | TTTGGGGG | miR395b | | | | |
| | | | AACTCC/403 | | | | | |
| 801 | 1 | 21 | GTGAAGTG | tae- | | | | |
| | | | TTTGGGGG | miR395a | | | | |
| | | | AACTC/404 | | | | | |
| 802 | 0.95 | 20 | TGAAGTGT | tae- | | | | |
| | | | TTGGGGGA | miR395b | | | | |
| | | | ACTC/405 | | | | | |
| 803 | 0.95 | 21 | CTGAAGTG | tcc- | | | | |
| | | | TTTGGGGG | miR395a | | | | |
| | | | AACTC/406 | | | | | |
| 804 | 0.95 | 21 | CTGAAGTG | tcc- | | | | |
| | | | TTTGGGGG | miR395b | | | | |
| | | | AACTC/407 | | | | | |
| 805 | 0.95 | 21 | CTGAAGTG | vvi- | | | | |
| | | | TTTGGGGG | miR395a | | | | |
| | | | AACTC/408 | | | | | |
| 806 | 0.95 | 21 | CTGAAGTG | vvi- | | | | |
| | | | TTTGGGGG | miR395b | | | | |
| | | | AACTC/409 | | | | | |
| 807 | 0.95 | 21 | CTGAAGTG | vvi- | | | | |
| | | | TTTGGGGG | miR395c | | | | |
| | | | AACTC/410 | | | | | |
| 808 | 0.95 | 21 | CTGAAGTG | vvi- | | | | |
| | | | TTTGGGGG | miR395d | | | | |
| | | | AACTC/411 | | | | | |
| 809 | 0.95 | 21 | CTGAAGTG | vvi- | | | | |
| | | | TTTGGGGG | miR395e | | | | |
| | | | AACTC/412 | | | | | |
| 810 | 0.95 | 21 | CTGAAGTG | vvi- | | | | |
| | | | TTTGGGGG | miR395f | | | | |
| | | | AACTC/413 | | | | | |
| 811 | 0.95 | 21 | CTGAAGTG | vvi- | | | | |
| | | | TTTGGGGG | miR395g | | | | |
| | | | AACTC/414 | | | | | |
| 812 | 0.95 | 21 | CTGAAGTG | vvi- | | | | |
| | | | TTTGGGGG | miR395h | | | | |
| | | | AACTC/415 | | | | | |
| 813 | 0.95 | 21 | CTGAAGTG | vvi- | | | | |
| | | | TTTGGGGG | miR395i | | | | |
| | | | AACTC/416 | | | | | |
| 814 | 0.95 | 21 | CTGAAGTG | vvi- | | | | |
| | | | TTTGGGGG | miR395j | | | | |
| | | | AACTC/417 | | | | | |
| 815 | 0.95 | 21 | CTGAAGTG | vvi- | | | | |
| | | | TTTGGGGG | miR395k | | | | |
| | | | AACTC/418 | | | | | |
| 816 | 0.95 | 21 | CTGAAGTG | vvi- | | | | |
| | | | TTTGGGGG | miR395l | | | | |
| | | | AACTC/419 | | | | | |
| 817 | 0.95 | 21 | CTGAAGTG | vvi- | | | | |
| | | | TTTGGGGG | miR395m | | | | |
| | | | AACTC/420 | | | | | |
| 818 | 0.81 | 21 | CTGAAGAG | vvi- | | | | |
| | | | TCTGGAGG | miR395n | | | | |
| | | | AACTC/421 | | | | | |
| 819 | 1 | 21 | GTGAAGTG | zma- | | | | |
| | | | TTTGGGGG | miR395a | | | | |
| | | | AACTC/422 | | | | | |
| 820 | 0.95 | 21 | GTGAAGTG | zma- | | | | |
| | | | TTTGGAGG | miR395c | | | | |
| | | | AACTC/423 | | | | | |
| 821/851 | 1.00/0.90 | 21/20 | GTGAAGTG | zma- | | | | |
| | | | TTTGGGGG | miR395d | | | | |
| | | | AACTC/424/ | | | | | |
| | | | GTGAAGTG | | | | | |
| | | | TTTGGAGG | | | | | |
| | | | AACT/451 | | | | | |
| 822/852 | 1.00/0.95 | 21 | GTGAAGTG | zma- | | | | |
| | | | TTTGGGGG | miR395e | | | | |
| | | | AACTC/425/ | | | | | |
| | | | GTGAAGTG | | | | | |
| | | | TTTGGAGG | | | | | |
| | | | AACTC/452 | | | | | |
| 823/853 | 1.00/0.90 | 21 | GTGAAGTG | zma- | | | | |
| | | | TTTGGGGG | miR395f | | | | |
| | | | AACTC/426/ | | | | | |
| | | | GTGAAGTG | | | | | |
| | | | TTTGAGGA | | | | | |
| | | | AACTC/453 | | | | | |
| 824 | 1 | 21 | GTGAAGTG | zma- | | | | |
| | | | TTTGGGGG | miR395g | | | | |
| | | | AACTC/427 | | | | | |
| 825 | 1 | 21 | GTGAAGTG | zma- | | | | |
| | | | TTTGGGGG | miR395h | | | | |
| | | | AACTC/428 | | | | | |
| 826 | 1 | 21 | GTGAAGTG | zma- | | | | |
| | | | TTTGGGGG | miR395i | | | | |
| | | | AACTC/429 | | | | | |
| 827 | 1 | 21 | GTGAAGTG | zma- | | | | |
| | | | TTTGGGGG | miR395j | | | | |
| | | | AACTC/430 | | | | | |
| 828 | 0.9 | 21 | GTGAAGTG | zma- | | | | |
| | | | TTTGAGGA | miR395k | | | | |
| | | | AACTC/431 | | | | | |
| 829 | 0.95 | 21 | GTGAAGTG | zma- | | | | |
| | | | TTTGGAGG | miR395l | | | | |
| | | | AACTC/432 | | | | | |
| 830 | 0.95 | 21 | GTGAAGTG | zma- | | | | |
| | | | TTTGGAGG | miR395m | | | | |
| | | | AACTC/433 | | | | | |
| 831 | 1 | 21 | GTGAAGTG | zma- | | | | |
| | | | TTTGGGGG | miR395n | | | | |
| | | | AACTC/434 | | | | | |
| 832 | 0.95 | 21 | GTGAAGTG | zma- | | | | |
| | | | TTTGGGTG | miR395o | | | | |
| | | | AACTC/435 | | | | | |
| 833 | 1 | 21 | GTGAAGTG | zma- | | | | |
| | | | TTTGGGGG | miR395p | | | | |
| | | | AACTC/436 | | | | | |
| 834 | 0.86 | 21 | AGAAGAGA | aqc- | 56 | 21 | AGAAGA | zma- |
| | | | GAGAGCAC | miR529 | | | GAGAGA | miR529 |
| | | | AACCC/437 | | | | GTACAG | |
| | | | | | | | CCT/1 | |
| 835 | 1 | 21 | AGAAGAGA | bdi- | | | | |
| | | | GAGAGTAC | miR529 | | | | |
| | | | AGCCT/438 | | | | | |
| 836 | 0.9 | 21 | AGAAGAGA | far- | | | | |
| | | | GAGAGCAC | miR529 | | | | |
| | | | AGCTT/439 | | | | | |
| 837 | 0.95 | 21 | AGAAGAGA | osa- | | | | |
| | | | GAGAGTAC | miR529b | | | | |
| | | | AGCTT/440 | | | | | |
| 838 | 0.86 | 21 | CGAAGAGA | ppt- | | | | |
| | | | GAGAGCAC | miR529a | | | | |
| | | | AGCCC/441 | | | | | |
| 839 | 0.86 | 21 | CGAAGAGA | ppt- | | | | |
| | | | GAGAGCAC | miR529b | | | | |
| | | | AGCCC/442 | | | | | |
| 840 | 0.86 | 21 | CGAAGAGA | ppt- | | | | |
| | | | GAGAGCAC | miR529c | | | | |
| | | | AGCCC/443 | | | | | |
| 841 | 0.9 | 21 | AGAAGAGA | ppt- | | | | |
| | | | GAGAGCAC | miR529d | | | | |
| | | | AGCCC/444 | | | | | |
| 842 | 0.95 | 21 | AGAAGAGA | ppt- | | | | |
| | | | GAGAGTAC | miR529e | | | | |
| | | | AGCCC/445 | | | | | |
| 843 | 0.95 | 21 | AGAAGAGA | ppt- | | | | |
| | | | GAGAGTAC | miR529f | | | | |
| | | | AGCCC/446 | | | | | |
| 844 | 0.81 | 21 | CGAAGAGA | ppt- | | | | |
| | | | GAGAGCAC | miR529g | | | | |
| | | | AGTCC/447 | | | | | |
| 845 | 0.9 | 22 | TAGCCAAG | bdi- | | 21 | TAGCCA | Predicted |
| | | | GATGATTT | miR169k | | | AGCATG | zma mir |
| | | | GCCTGT/448 | | | | ATTTGCC | 50601 |
| | | | | | | | CG/5 | |
| 846 | 0.9 | 21 | TAGCCAAG | sbi- | | | | |
| | | | GATGATTT | miR1690 | | | | |
| | | | GCCTG/449 | | | | | |

### Example 3

### Identification of miRNAs Associated with Increased NUE and Target Prediction Using Bioinformatics Tools

[0291] miRNAs that are associated with improved NUE and/or abiotic or biotic stress tolerance were identified by computational algorithms that analyze RNA expression profiles alongside publicly available gene and protein databases. A high throughput screening was performed on microarrays loaded with miRNAs that were found to be differentially expressed under multiple stress and optimal environmental conditions and in different plant tissues. The initial trait-associated miRNAs were later validated by quantitative Real Time PCR (qRT-PCR).

[0292] Target prediction—orthologous genes to the genes of interest in maize and/or Arabidopsis were found through a bioinformatic tool that analyzes publicly available genomic as well as expression and gene annotation databases from multiple plant species. Homologous as well as orthologous protein and nucleotide sequences of target genes of the small RNA sequences of the invention, were found using BLAST having at least 70% identity on at least 60% of the entire master (maize) gene length, and are summarized in Tables 5-6 below.

TABLE 5
Target Genes of Small RNA Molecules that are upregulated during NUE.

| | Protein | | | | |
|---|---|---|---|---|---|
| Nucleotide | Sequence | | | | Nucleotide |
| Sequence | seq id | | % | | NCBI GI |
| seq id no: | no: | Organism | Identity | Anotation | number |
| 895 | 854 | Zea mays | 1 | hypothetical | 293331460 |
| | | | | protein | |
| | | | | LOC100384547 | |
| | | | | [Zea | |
| | | | | mays] | |
| | | | | &gt; gi\|238005886\| | |
| | | | | gb\|ACR33978.1\| | |
| | | | | unknown | |
| | | | | [Zea mays] | |
| | 855 | Zea mays | 1 | putative gag- | 23928433 |
| | | | | pol | |
| | | | | polyprotein | |
| | | | | [Zea mays] | |
| 896 | 856 | Eulaliopsis | 1 | embryonic | 315493433 |
| | | binata | | flower 1 | |
| | | | | protein | |
| | | | | [Eulaliopsis | |
| | | | | binata] | |
| 897 | 857 | Zea mays | 0.923445 | EMF-like | 85062576 |
| | | | | [Zea mays] | |
| 898 | 858 | Zea mays | 0.9346093 | VEF family | 162461707 |
| | | | | protein [Zea | |
| | | | | mays] | |
| | | | | &gt; gi\|29569111\| | |
| | | | | gb\|AAO84022.1\| | |
| | | | | VEF family | |
| | | | | protein [Zea | |
| | | | | mays] | |
| | | | | &gt; gi\|60687422\| | |
| | | | | gb\|AAX35735.1\| | |
| | | | | embryonic | |
| | | | | flower 2 [Zea | |
| | | | | mays] | |
| 899 | 859 | Dendrocalamus | 0.8054226 | EMF2 | 82469918 |
| | | latiflorus | | [Dendrocalamus | |
| | | | | latiflorus] | |
| 900 | 860 | Triticum | 0.7974482 | embryonic | 62275660 |
| | | aestivum | | flower 2 | |
| | | | | [Triticum | |
| | | | | aestivum] | |
| 901 | 861 | Oryza | 0.7575758 | Os09g0306800 | 115478459 |
| | | sativa | | [Oryza | |
| | | Japonica | | sativa | |
| | | Group | | Japonica | |
| | | | | Group] | |
| | | | | &gt; gi\|255678755\| | |
| | | | | dbj\|BAF24739.2\| | |
| | | | | Os09g0306800 | |
| | | | | [Oryza | |
| | | | | sativa | |
| | | | | Japonica | |
| | | | | Group] | |
| | 862 | Oryza | 0.7575758 | putative VEF | 51091694 |
| | | sativa | | family | |
| | | Japonica | | protein | |
| | | Group | | [Oryza sativa | |
| | | | | Japonica | |
| | | | | Group] | |
| 902 | 863 | Eulaliopsis | 0.7575758 | embryonic | 315493435 |
| | | binata | | flower 2 | |
| | | | | protein | |
| | | | | [Eulaliopsis | |
| | | | | binata] | |
| 903 | 864 | Hordeum | 0.76874 | predicted | 326503299 |
| | | vulgare | | protein | |
| | | subsp. | | [Hordeum | |
| | | vulgare | | vulgare | |
| | | | | subsp. | |
| | | | | vulgare] | |
| 904 | 865 | Hordeum | 0.7703349 | HvEMF2b | 66796110 |
| | | vulgare | | [Hordeum | |
| | | | | vulgare] | |
| 905 | 866 | Zea mays | 1 | VEF family | 162461707 |
| | | | | protein [Zea | |
| | | | | mays] | |
| | | | | &gt; gi\|29569111\| | |
| | | | | gb\|AAO84022.1\| | |
| | | | | VEF family | |
| | | | | protein [Zea | |
| | | | | mays] | |
| | | | | &gt; gi\|60687422\| | |
| | | | | gb\|AAX35735.1\| | |
| | | | | embryonic | |
| | | | | flower 2 [Zea | |
| | | | | mays] | |
| 906 | 867 | Zea mays | 0.9792332 | EMF-like | 85062576 |
| | | | | [Zea mays] | |
| 907 | 868 | Eulaliopsis | 0.9361022 | embryonic | 315493433 |
| | | binata | | flower 1 | |
| | | | | protein | |
| | | | | [Eulaliopsis | |
| | | | | binata] | |
| 908 | 869 | Dendrocalamus | 0.8083067 | EMF2 | 82469918 |
| | | latiflorus | | [Dendrocalamus | |
| | | | | latiflorus] | |
| 909 | 870 | Triticum | 0.8019169 | embryonic | 62275660 |
| | | aestivum | | flower 2 | |
| | | | | [Triticum | |
| | | | | aestivum] | |
| 910 | 871 | Oryza | 0.7571885 | Os09g0306800 | 115478459 |
| | | sativa | | [Oryza | |
| | | Japonica | | sativa | |
| | | Group | | Japonica | |
| | | | | Group] | |
| | | | | &gt; gi\|255678755\| | |
| | | | | dbj\|BAF24739.2\| | |
| | | | | Os09g0306800 | |
| | | | | [Oryza | |
| | | | | sativa | |
| | | | | Japonica | |
| | | | | Group] | |
| | 872 | Oryza | 0.7555911 | putative VEF | 51091694 |
| | | sativa | | family | |
| | | Japonica | | protein | |
| | | Group | | [Oryza sativa | |
| | | | | Japonica | |
| | | | | Group] | |
| 911 | 873 | Eulaliopsis | 0.7635783 | embryonic | 315493435 |
| | | binata | | flower 2 | |
| | | | | protein | |
| | | | | [Eulaliopsis | |
| | | | | binata] | |
| 912 | 874 | Hordeum | 0.7747604 | predicted | 326503299 |
| | | vulgare | | protein | |
| | | subsp. | | [Hordeum | |
| | | vulgare | | vulgare | |
| | | | | subsp. | |
| | | | | vulgare] | |
| 913 | 875 | Hordeum | 0.7763578 | HvEMF2b | 66796110 |
| | | vulgare | | [Hordeum | |
| | | | | vulgare] | |
| | 876 | Sorghum | 1 | hypothetical | 255761094 |
| | | bicolor | | protein | |
| | | | | SORBIDRAFT_04g031920 | |
| | | | | [Sorghum | |
| | | | | bicolor] | |
| | | | | &gt; gi\|241934313\| | |
| | | | | gb\|EES07458.1\| | |
| | | | | hypothetical | |
| | | | | protein | |
| | | | | SORBIDRAFT_04g031920 | |
| | | | | [Sorghum | |
| | | | | bicolor] | |
| 914 | 877 | Zea mays | 0.9425287 | unknown | 223972968 |
| | | | | [Zea mays] | |
| 915 | 878 | Zea mays | 0.941092 | hypothetical | 308044322 |
| | | | | protein | |
| | | | | LOC100501893 | |
| | | | | [Zea | |
| | | | | mays] | |
| | | | | &gt; gi\|238011698\| | |
| | | | | gb\|ACR36884.1\| | |
| | | | | unknown | |
| | | | | [Zea mays] | |
| | 879 | Oryza | 0.8706897 | RecName: | |
| | | sativa | | Full = SPX | |
| | | Japonica | | domain- | |
| | | Group | | containing | |
| | | | | membrane | |
| | | | | protein | |
| | | | | Os02g45520 | |
| | | | | &gt; gi\|306756291\| | |
| | | | | sp\|A2X8A7.2\| | |
| | | | | SPXM1_ORYSI | |
| | | | | RecName: | |
| | | | | Full = SPX | |
| | | | | domain- | |
| | | | | containing | |
| | | | | membrane | |
| | | | | protein | |
| | | | | OsI_08463 | |
| | | | | &gt; gi\|50252990\| | |
| | | | | dbj\|BAD29241.1\| | |
| | | | | SPX | |
| | | | | (SYG1/Pho81/ | |
| | | | | XPR1) | |
| | | | | domain- | |
| | | | | containing | |
| | | | | protein-like | |
| | | | | [Oryza sativa | |
| | | | | Japonica | |
| | | | | Group] | |
| | | | | &gt; gi\|50253121\| | |
| | | | | dbj\|BAD29367.1\| | |
| | | | | SPX | |
| | | | | (SYG1/Pho81/ | |
| | | | | XPR1) | |
| | | | | domain- | |
| | | | | containing | |
| | | | | protein-like | |
| | | | | [Oryza sativa | |
| | | | | Japonica | |
| | | | | Group] | |
| 916 | 880 | Hordeum | 0.8347701 | predicted | 326502341 |
| | | vulgare | | protein | |
| | | subsp. | | [Hordeum | |
| | | vulgare | | vulgare | |
| | | | | subsp. | |
| | | | | vulgare] | |
| | 881 | Oryza | 0.808908 | OSJNBa0019K04.6 | 38605939 |
| | | sativa | | [Oryza sativa | |
| | | Japonica | | Japonica | |
| | | Group | | Group] | |
| | | | | &gt; gi\|125591348\| | |
| | | | | gb\|EAZ31698.1\| | |
| | | | | hypothetical | |
| | | | | protein | |
| | | | | OsJ_15847 | |
| | | | | [Oryza sativa | |
| | | | | Japonica | |
| | | | | Group] | |
| 917 | 882 | Oryza | 0.808908 | Os04g0573000 | 115460021 |
| | | sativa | | [Oryza | |
| | | Japonica | | sativa | |
| | | Group | | Japonica | |
| | | | | Group] | |
| | | | | &gt; gi\|306756012\| | |
| | | | | sp\|B8AT51.1\| | |
| | | | | SPXM2_ORYSI | |
| | | | | RecName: | |
| | | | | Full = SPX | |
| | | | | domain- | |
| | | | | containing | |
| | | | | membrane | |
| | | | | protein | |
| | | | | OsI_17046 | |
| | | | | &gt; gi\|306756288\| | |
| | | | | sp\|Q0JAW2.2\| | |
| | | | | SPXM2_ORYSJ | |
| | | | | RecName: | |
| | | | | Full = SPX | |
| | | | | domain- | |
| | | | | containing | |
| | | | | membrane | |
| | | | | protein | |
| | | | | Os04g0573000 | |
| | | | | &gt; gi\|215694614\| | |
| | | | | dbj\|BAG89805.1\| | |
| | | | | unnamed | |
| | | | | protein | |
| | | | | product | |
| | | | | [Oryza sativa | |
| | | | | Japonica | |
| | | | | Group] | |
| | | | | &gt; gi\|218195403\| | |
| | | | | gb\|EEC77830.1\| | |
| | | | | hypothetical | |
| | | | | protein | |
| | | | | OsI_17046 | |
| | | | | [Oryza sativa | |
| | | | | Indica | |
| | | | | Group] | |
| | | | | &gt; gi\|255675707\| | |
| | | | | dbj\|BAF15525.2\| | |
| | | | | Os04g0573000 | |
| | | | | [Oryza | |
| | | | | sativa | |
| | | | | Japonica | |
| | | | | Group] | |
| 918 | 883 | Oryza | 0.8060345 | OSIGBa0147H17.5 | 116309919 |
| | | sativa | | [Oryza sativa | |
| | | Indica | | Indica | |
| | | Group | | Group] | |
| | 884 | Sorghum | 0.7844828 | hypothetical | 255761094 |
| | | bicolor | | protein | |
| | | | | SORBIDRAFT_06g025950 | |
| | | | | [Sorghum | |
| | | | | bicolor] | |
| | | | | &gt; gi\|241938147\| | |
| | | | | gb\|EES11292.1\| | |
| | | | | hypothetical | |
| | | | | protein | |
| | | | | SORBIDRAFT_06g025950 | |
| | | | | [Sorghum | |
| | | | | bicolor] | |
| 919 | 885 | Vitis | 0.7212644 | PREDICTED: | 225426756 |
| | | vinifera | | hypothetical | |
| | | | | protein [Vitis | |
| | | | | vinifera] | |
| | | | | &gt; gi\|297742609\| | |
| | | | | emb\|CBI34758.3\| | |
| | | | | unnamed | |
| | | | | protein | |
| | | | | product | |
| | | | | [Vitis | |
| | | | | vinifera] | |
| | 886 | Sorghum | 1 | hypothetical | 255761094 |
| | | bicolor | | protein | |
| | | | | SORBIDRAFT_02g027920 | |
| | | | | [Sorghum | |
| | | | | bicolor] | |
| | | | | &gt; gi\|241925925\| | |
| | | | | gb\|EER99069.1\| | |
| | | | | hypothetical | |
| | | | | protein | |
| | | | | SORBIDRAFT_02g027920 | |
| | | | | [Sorghum | |
| | | | | bicolor] | |
| 920 | 887 | Zea mays | 0.8819188 | hypothetical | 226498793 |
| | | | | protein | |
| | | | | LOC100279277 | |
| | | | | [Zea | |
| | | | | mays] | |
| | | | | &gt; gi\|219884365\| | |
| | | | | gb\|ACL52557.1\| | |
| | | | | unknown | |
| | | | | [Zea mays] | |
| 921 | 888 | Zea mays | 0.8523985 | unknown | 224030802 |
| | | | | [Zea mays] | |
| 922 | 889 | Zea mays | 0.8523985 | hypothetical | 226530255 |
| | | | | protein | |
| | | | | LOC100278416 | |
| | | | | [Zea | |
| | | | | mays] | |
| | | | | &gt; gi\|195652339\| | |
| | | | | gb\|ACG45637.1\| | |
| | | | | hypothetical | |
| | | | | protein [Zea | |
| | | | | mays] | |
| 923 | 890 | Zea mays | 1 | hypothetical | 212274814 |
| | | | | protein | |
| | | | | LOC100191388 | |
| | | | | [Zea | |
| | | | | mays] | |
| | | | | &gt; gi\|194688768\| | |
| | | | | gb\|ACF78468.1\| | |
| | | | | unknown | |
| | | | | [Zea mays] | |
| 924 | 891 | Oryza | 0.7869822 | Os09g0135400 | 115478085 |
| | | sativa | | [Oryza | |
| | | Japonica | | sativa | |
| | | Group | | Japonica | |
| | | | | Group] | |
| | | | | &gt; gi\|47848428\| | |
| | | | | dbj\|BAD22285.1\| | |
| | | | | putative | |
| | | | | octicosapeptide/ | |
| | | | | Phox/Bem1p | |
| | | | | (PB1) | |
| | | | | domain- | |
| | | | | containing | |
| | | | | protein | |
| | | | | [Oryza sativa | |
| | | | | Japonica | |
| | | | | Group] | |
| | | | | &gt; gi\|113630871\| | |
| | | | | dbj\|BAF24552.1\| | |
| | | | | Os09g0135400 | |
| | | | | [Oryza | |
| | | | | sativa | |
| | | | | Japonica | |
| | | | | Group] | |
| | 892 | Sorghum | 1 | hypothetical | 255761094 |
| | | bicolor | | protein | |
| | | | | SORBIDRAFT_02g037770 | |
| | | | | [Sorghum | |
| | | | | bicolor] | |
| | | | | &gt; gi\|241924313\| | |
| | | | | gb\|EER97457.1\| | |
| | | | | hypothetical | |
| | | | | protein | |
| | | | | SORBIDRAFT_02g037770 | |
| | | | | [Sorghum | |
| | | | | bicolor] | |
| 925 | 893 | Zea mays | 0.8738462 | hypothetical | 226507742 |
| | | | | protein | |
| | | | | LOC100279098 | |
| | | | | [Zea | |
| | | | | mays] | |
| | | | | &gt; gi\|195658887\| | |
| | | | | gb\|ACG48911.1\| | |
| | | | | hypothetical | |
| | | | | protein [Zea | |
| | | | | mays] | |
| 926 | 894 | Zea mays | 0.8307692 | hypothetical | 226495966 |
| | | | | protein | |
| | | | | LOC100278263 | |
| | | | | [Zea | |
| | | | | mays] | |
| | | | | &gt; gi\|195650593\| | |
| | | | | gb\|ACG44764.1\| | |
| | | | | hypothetical | |
| | | | | protein [Zea | |
| | | | | mays] | |

| | Protein | | | | |
|---|---|---|---|---|---|
| Nucleotide | Sequence | Homolog | miR | | |
| Sequence | seq id | NCBI | Binding | miR | miR |
| seq id no: | no: | Accession | Position | sequence | name |
| 895 | 854 | NP_001170533 | 105-125 | AGGATG | Predicted |
| | | | | CTGACG | zma |
| | | | | CAATGG | mir |
| | | | | GAT/9 | 48486 |
| | 855 | AAN40030 | 33-54 | AGGATG | Predicted |
| | | | | TGAGGC | zma |
| | | | | TATTGG | mir |
| | | | | GGAC/6 | 48492 |
| 896 | 856 | ADU32889 | 1977-1997 | TTAGAT | zma- |
| | | | | GACCAT | miR827 |
| | | | | CAGCAA | |
| | | | | ACA/10 | |
| 897 | 857 | ABC69154 | | | |
| 898 | 858 | NP_001105530 | | | |
| 899 | 859 | ABB77210 | | | |
| 900 | 860 | AAX78232 | | | |
| 901 | 861 | NP_001062825 | | | |
| | 862 | BAD36510 | | | |
| 902 | 863 | ADU32890 | | | |
| 903 | 864 | BAJ99275 | | | |
| 904 | 865 | BAD99131 | | | |
| 905 | 866 | NP_001105530 | 1748-1768 | | |
| 906 | 867 | ABC69154 | | | |
| 907 | 868 | ADU32889 | | | |
| 908 | 869 | ABB77210 | | | |
| 909 | 870 | AAX78232 | | | |
| 910 | 871 | NP_001062825 | | | |
| | 872 | BAD36510 | | | |
| 911 | 873 | ADU32890 | | | |
| 912 | 874 | BAJ99275 | | | |
| 913 | 875 | BAD99131 | | | |
| | 876 | XP_002454482 | 580-600 | | |
| 914 | 877 | ACN30672 | | | |
| 915 | 878 | NP_001183461 | | | |
| | 879 | Q6EPQ3 | | | |
| 916 | 880 | BAJ95234 | | | |
| | 881 | CAD41659 | | | |
| 917 | 882 | NP_001053611 | | | |
| 918 | 883 | CAH66957 | | | |
| | 884 | XP_002446964 | | | |
| 919 | 885 | XP_002282540 | | | |
| | 886 | XP_002462548 | 965-985 | | |
| 920 | 887 | NP_001145770 | | | |
| 921 | 888 | ACN34477 | | | |
| 922 | 889 | NP_001145176 | | | |
| 923 | 890 | NP_001130294 | 1075-1095 | | |
| 924 | 891 | NP_001062638 | | | |
| | 892 | XP_002460936 | 547-567 | ATTCAC | mtr- |
| | | | | GGGGAC | miR2647a |
| | | | | GAACCT | |
| | | | | CCT/8 | |
| 925 | 893 | NP_001145615 | | | |
| 926 | 894 | NP_001145067 | | | |

TABLE 6
Target Genes of Small RNA Molecules that are down regulated during
NUE.

| | Protein | | | | Nucleotide |
|---|---|---|---|---|---|
| Nucleotide | seq id | | % | | NCBI GI |
| seq id no: | no: | Organism | Identity | Annotation | number |
| | 927 | Sorghum | 1 | hypothetical | 255761094 |
| | | bicolor | | protein | |
| | | | | SORBIDRAFT_01g008450 | |
| | | | | [Sorghum | |
| | | | | bicolor] | |
| | | | | &gt; gi\|241917750\| | |
| | | | | gb\|EER90894.1\| | |
| | | | | hypothetical | |
| | | | | protein | |
| | | | | SORBIDRAFT_01g008450 | |
| | | | | [Sorghum | |
| | | | | bicolor] | |
| 1022 | 928 | Zea mays | 0.946721311 | unknown | 223949050 |
| | | | | [Zea mays] | |
| 1023 | 929 | Zea mays | 0.954918033 | unknown | 224029894 |
| | | | | [Zea mays] | |
| 1024 | 930 | Zea mays | 0.942622951 | bifunctional | 195651448 |
| | | | | 3- | |
| | | | | phosphoadenosine | |
| | | | | 5- | |
| | | | | phosphosulfate | |
| | | | | synthetase | |
| | | | | [Zea mays] | |
| 1025 | 931 | Zea mays | 0.946721311 | ATP | 162463127 |
| | | | | sulfurylase | |
| | | | | [Zea mays] | |
| | | | | &gt; gi\|2738750\| | |
| | | | | gb\|AAB94542.1\| | |
| | | | | ATP | |
| | | | | sulfurylase | |
| | | | | [Zea mays] | |
| | 932 | Oryza | 0.799180328 | hypothetical | 54362548 |
| | | sativa | | protein | |
| | | Indica | | OsI_13470 | |
| | | Group | | [Oryza | |
| | | | | sativa Indica | |
| | | | | Group] | |
| 1026 | 933 | Oryza | 0.797131148 | Os03g0743900 | 115455266 |
| | | sativa | | [Oryza | |
| | | Japonica | | sativa | |
| | | Group | | Japonica | |
| | | | | Group] | |
| | | | | &gt; gi\|30017582\| | |
| | | | | gb\|AAP13004.1\| | |
| | | | | putative | |
| | | | | ATP | |
| | | | | sulfurylase | |
| | | | | [Oryza | |
| | | | | sativa | |
| | | | | Japonica | |
| | | | | Group] | |
| | | | | &gt; gi\|108711024\| | |
| | | | | gb\|ABF98819.1\| | |
| | | | | Bifunctional | |
| | | | | 3&apos; - | |
| | | | | phosphoadenosine | |
| | | | | 5&apos; - | |
| | | | | phosphosulfate | |
| | | | | synthethase, | |
| | | | | putative, | |
| | | | | expressed | |
| | | | | [Oryza | |
| | | | | sativa | |
| | | | | Japonica | |
| | | | | Group] | |
| | | | | &gt; gi\|113549705\| | |
| | | | | dbj\|BAF13148.1\| | |
| | | | | Os03g0743900 | |
| | | | | [Oryza | |
| | | | | sativa | |
| | | | | Japonica | |
| | | | | Group] | |
| | | | | &gt; gi\|215704581\| | |
| | | | | dbj\|BAG94214.1\| | |
| | | | | unnamed | |
| | | | | protein | |
| | | | | product | |
| | | | | [Oryza | |
| | | | | sativa | |
| | | | | Japonica | |
| | | | | Group] | |
| 1027 | 934 | Hordeum | 0.793032787 | predicted | 326491124 |
| | | vulgare | | protein | |
| | | subsp. | | [Hordeum | |
| | | vulgare | | vulgare | |
| | | | | subsp. | |
| | | | | vulgare] | |
| | | | | &gt; gi\|326502564\| | |
| | | | | dbj\|BAJ95345.1\| | |
| | | | | predicted | |
| | | | | protein | |
| | | | | [Hordeum | |
| | | | | vulgare | |
| | | | | subsp. | |
| | | | | vulgare] | |
| 1028 | 935 | Oryza | 0.797131148 | plastidic | 3986152 |
| | | sativa | | ATP | |
| | | Indica | | sulfurylase | |
| | | Group | | [Oryza | |
| | | | | sativa Indica | |
| | | | | Group] | |
| | 936 | Oryza | 0.770491803 | hypothetical | 54398660 |
| | | sativa | | protein | |
| | | Japonica | | OsJ_12530 | |
| | | Group | | [Oryza | |
| | | | | sativa | |
| | | | | Japonica | |
| | | | | Group] | |
| | 937 | Sorghum | 1 | hypothetical | 255761094 |
| | | bicolor | | protein | |
| | | | | SORBIDRAFT_08g004650 | |
| | | | | [Sorghum | |
| | | | | bicolor] | |
| | | | | &gt; gi\|241942597\| | |
| | | | | gb\|EES15742.1\| | |
| | | | | hypothetical | |
| | | | | protein | |
| | | | | SORBIDRAFT_08g004650 | |
| | | | | [Sorghum | |
| | | | | bicolor] | |
| 1029 | 938 | Oryza | 0.705440901 | Os12g0174100 | 115487595 |
| | | sativa | | [Oryza | |
| | | Japonica | | sativa | |
| | | Group | | Japonica | |
| | | | | Group] | |
| | | | | &gt; gi\|77553790\| | |
| | | | | gb\|ABA96586.1\| | |
| | | | | Growth | |
| | | | | regulator | |
| | | | | protein, | |
| | | | | putative, | |
| | | | | expressed | |
| | | | | [Oryza | |
| | | | | sativa | |
| | | | | Japonica | |
| | | | | Group] | |
| | | | | &gt; gi\|255670095\| | |
| | | | | dbj\|BAF29304.2\| | |
| | | | | Os12g0174100 | |
| | | | | [Oryza | |
| | | | | sativa | |
| | | | | Japonica | |
| | | | | Group] | |
| | 939 | Oryza | 0.705440901 | hypothetical | 54398660 |
| | | sativa | | protein | |
| | | Japonica | | OsJ_35390 | |
| | | Group | | [Oryza | |
| | | | | sativa | |
| | | | | Japonica | |
| | | | | Group] | |
| | 940 | Oryza | 0.701688555 | hypothetical | 54362548 |
| | | sativa | | protein | |
| | | Indica | | OsI_37646 | |
| | | Group | | [Oryza | |
| | | | | sativa Indica | |
| | | | | Group] | |
| 1030 | 941 | Zea mays | 1 | unknown | 224029894 |
| | | | | [Zea mays] | |
| 1031 | 942 | Zea mays | 0.983640082 | ATP | 162463127 |
| | | | | sulfurylase | |
| | | | | [Zea mays] | |
| | | | | &gt; gi\|2738750\| | |
| | | | | gb\|AAB94542.1\| | |
| | | | | ATP | |
| | | | | sulfurylase | |
| | | | | [Zea mays] | |
| 1032 | 943 | Zea mays | 0.940695297 | unknown | 223949050 |
| | | | | [Zea mays] | |
| 1033 | 944 | Zea mays | 0.936605317 | bifunctional | 195651448 |
| | | | | 3- | |
| | | | | phosphoadenosine | |
| | | | | 5- | |
| | | | | phosphosulfate | |
| | | | | synthetase | |
| | | | | [Zea mays] | |
| | 945 | Sorghum | 0.938650307 | hypothetical | 255761094 |
| | | bicolor | | protein | |
| | | | | SORBIDRAFT_01g008450 | |
| | | | | [Sorghum | |
| | | | | bicolor] | |
| | | | | &gt; gi\|241917750\| | |
| | | | | gb\|EER90894.1\| | |
| | | | | hypothetical | |
| | | | | protein | |
| | | | | SORBIDRAFT_01g008450 | |
| | | | | [Sorghum | |
| | | | | bicolor] | |
| 1034 | 946 | Hordeum | 0.842535787 | predicted | 326491124 |
| | | vulgare | | protein | |
| | | subsp. | | [Hordeum | |
| | | vulgare | | vulgare | |
| | | | | subsp. | |
| | | | | vulgare] | |
| | | | | &gt; gi\|326502564\| | |
| | | | | dbj\|BAJ95345.1\| | |
| | | | | predicted | |
| | | | | protein | |
| | | | | [Hordeum | |
| | | | | vulgare | |
| | | | | subsp. | |
| | | | | vulgare] | |
| | 947 | Oryza | 0.795501022 | hypothetical | 54362548 |
| | | sativa | | protein | |
| | | Indica | | OsI_13470 | |
| | | Group | | [Oryza | |
| | | | | sativa Indica | |
| | | | | Group] | |
| 1035 | 948 | Oryza | 0.793456033 | Os03g0743900 | 115455266 |
| | | sativa | | [Oryza | |
| | | Japonica | | sativa | |
| | | Group | | Japonica | |
| | | | | Group] | |
| | | | | &gt; gi\|30017582\| | |
| | | | | gb\|AAP13004.1\| | |
| | | | | putative | |
| | | | | ATP | |
| | | | | sulfurylase | |
| | | | | [Oryza | |
| | | | | sativa | |
| | | | | Japonica | |
| | | | | Group] | |
| | | | | &gt; gi\|108711024\| | |
| | | | | gb\|ABF98819.1\| | |
| | | | | Bifunctional | |
| | | | | 3&apos; - | |
| | | | | phosphoadenosine | |
| | | | | 5&apos; - | |
| | | | | phosphosulfate | |
| | | | | synthethase, | |
| | | | | putative, | |
| | | | | expressed | |
| | | | | [Oryza | |
| | | | | sativa | |
| | | | | Japonica | |
| | | | | Group] | |
| | | | | &gt; gi\|113549705\| | |
| | | | | dbj\|BAF13148.1\| | |
| | | | | Os03g0743900 | |
| | | | | [Oryza | |
| | | | | sativa | |
| | | | | Japonica | |
| | | | | Group] | |
| | | | | &gt; gi\|215704581\| | |
| | | | | dbj\|BAG94214.1\| | |
| | | | | unnamed | |
| | | | | protein | |
| | | | | product | |
| | | | | [Oryza | |
| | | | | sativa | |
| | | | | Japonica | |
| | | | | Group] | |
| 1036 | 949 | Oryza | 0.793456033 | plastidic | 3986152 |
| | | sativa | | ATP | |
| | | Indica | | sulfurylase | |
| | | Group | | [Oryza | |
| | | | | sativa Indica | |
| | | | | Group] | |
| | 950 | Oryza | 0.764826176 | hypothetical | 54398660 |
| | | sativa | | protein | |
| | | Japonica | | OsJ_12530 | |
| | | Group | | [Oryza | |
| | | | | sativa | |
| | | | | Japonica | |
| | | | | Group] | |
| | 951 | Sorghum | 1 | hypothetical | 255761094 |
| | | bicolor | | protein | |
| | | | | SORBIDRAFT_04g026710 | |
| | | | | [Sorghum | |
| | | | | bicolor] | |
| | | | | &gt; gi\|241932317\| | |
| | | | | gb\|EES05462.1\| | |
| | | | | hypothetical | |
| | | | | protein | |
| | | | | SORBIDRAFT_04g026710 | |
| | | | | [Sorghum | |
| | | | | bicolor] | |
| 1037 | 952 | Zea mays | 0.880208333 | unknown | 223974072 |
| | | | | [Zea mays] | |
| 1038 | 953 | Zea mays | 0.880208333 | hypothetical | 226500051 |
| | | | | protein | |
| | | | | LOC100276301 | |
| | | | | [Zea | |
| | | | | mays] | |
| | | | | &gt; gi\|195623072\| | |
| | | | | gb\|ACG33366.1\| | |
| | | | | hypothetical | |
| | | | | protein [Zea | |
| | | | | mays] | |
| 1039 | 954 | Zea mays | 0.864583333 | hypothetical | 226492590 |
| | | | | protein | |
| | | | | LOC100277041 | |
| | | | | [Zea | |
| | | | | mays] | |
| | | | | &gt; gi\|195638130\| | |
| | | | | gb\|ACG38533.1\| | |
| | | | | hypothetical | |
| | | | | protein [Zea | |
| | | | | mays] | |
| | | | | &gt; gi\|223942145\| | |
| | | | | gb\|ACN25156.1\| | |
| | | | | unknown | |
| | | | | [Zea mays] | |
| 1040 | 955 | Oryza | 0.776041667 | Os02g0631000 | 115447434 |
| | | sativa | | [Oryza | |
| | | Japonica | | sativa | |
| | | Group | | Japonica | |
| | | | | Group] | |
| | | | | &gt; gi\|49389184\| | |
| | | | | dbj\|BAD26474.1\| | |
| | | | | unknown | |
| | | | | protein | |
| | | | | [Oryza | |
| | | | | sativa | |
| | | | | Japonica | |
| | | | | Group] | |
| | | | | &gt; gi\|113537028\| | |
| | | | | dbj\|BAF09411.1\| | |
| | | | | Os02g0631000 | |
| | | | | [Oryza | |
| | | | | sativa | |
| | | | | Japonica | |
| | | | | Group] | |
| | | | | &gt; gi\|215697023\| | |
| | | | | dbj\|BAG91017.1\| | |
| | | | | unnamed | |
| | | | | protein | |
| | | | | product | |
| | | | | [Oryza | |
| | | | | sativa | |
| | | | | Japonica | |
| | | | | Group] | |
| | | | | &gt; gi\|218191219\| | |
| | | | | gb\|EEC73646.1\| | |
| | | | | hypothetical | |
| | | | | protein | |
| | | | | OsI_08167 | |
| | | | | [Oryza | |
| | | | | sativa Indica | |
| | | | | Group] | |
| | | | | &gt; gi\|222623287\| | |
| | | | | gb\|EEE57419.1\| | |
| | | | | hypothetical | |
| | | | | protein | |
| | | | | OsJ_07614 | |
| | | | | [Oryza | |
| | | | | sativa | |
| | | | | Japonica | |
| | | | | Group] | |
| 1041 | 956 | Hordeum | 0.760416667 | predicted | 326512283 |
| | | vulgare | | protein | |
| | | subsp. | | [Hordeum | |
| | | vulgare | | vulgare | |
| | | | | subsp. | |
| | | | | vulgare] | |
| | | | | &gt; gi\|326519272\| | |
| | | | | dbj\|BAJ96635.1\| | |
| | | | | predicted | |
| | | | | protein | |
| | | | | [Hordeum | |
| | | | | vulgare | |
| | | | | subsp. | |
| | | | | vulgare] | |
| 1042 | 957 | Zea mays | 1 | AP2 domain | 148964889 |
| | | | | transcription | |
| | | | | factor [Zea | |
| | | | | mays] | |
| 1043 | 958 | Zea mays | 0.96043956 | AP2 domain | 148964859 |
| | | | | transcription | |
| | | | | factor [Zea | |
| | | | | mays] | |
| | 959 | Sorghum | 1 | hypothetical | 255761094 |
| | | bicolor | | protein | |
| | | | | SORBIDRAFT_02g007000 | |
| | | | | [Sorghum | |
| | | | | bicolor] | |
| | | | | &gt; gi\|241922957\| | |
| | | | | gb\|EER96101.1\| | |
| | | | | hypothetical | |
| | | | | protein | |
| | | | | SORBIDRAFT_02g007000 | |
| | | | | [Sorghum | |
| | | | | bicolor] | |
| 1044 | 960 | Zea mays | 0.85528757 | sister of | 225703093 |
| | | | | indeterminate | |
| | | | | spikelet 1 | |
| | | | | [Zea mays] | |
| | | | | &gt; gi\|223947941\| | |
| | | | | gb\|ACN28054.1\| | |
| | | | | unknown | |
| | | | | [Zea mays] | |
| 1045 | 961 | Zea mays | 0.844155844 | sister of | 224579291 |
| | | | | indeterminate | |
| | | | | spikelet 1 | |
| | | | | [Zea mays] | |
| 1046 | 962 | Zea mays | 0.742115028 | floral | 195653672 |
| | | | | homeotic | |
| | | | | protein [Zea | |
| | | | | mays] | |
| | | | | &gt; gi\|238015134\| | |
| | | | | gb\|ACR38602.1\| | |
| | | | | unknown | |
| | | | | [Zea mays] | |
| 1047 | 963 | Oryza | 1 | Os01g0834500 | 115440880 |
| | | sativa | | [Oryza | |
| | | Japonica | | sativa | |
| | | Group | | Japonica | |
| | | | | Group] | |
| | | | | &gt; gi\|115456215\| | |
| | | | | ref\|NP_001051708.1\| | |
| | | | | Os03g0818400 | |
| | | | | [Oryza | |
| | | | | sativa | |
| | | | | Japonica | |
| | | | | Group] | |
| | | | | &gt; gi\|297720551\| | |
| | | | | ref\|NP_001172637.1\| | |
| | | | | Os01g0834601 | |
| | | | | [Oryza | |
| | | | | sativa | |
| | | | | Japonica | |
| | | | | Group] | |
| | | | | &gt; gi\|313103637\| | |
| | | | | pdb\|3IZ6\| | |
| | | | | L Chain | |
| | | | | L, | |
| | | | | Localization | |
| | | | | Of The | |
| | | | | Small | |
| | | | | Subunit | |
| | | | | Ribosomal | |
| | | | | Proteins Into | |
| | | | | A 5.5 A | |
| | | | | Cryo-Em | |
| | | | | Map Of | |
| | | | | Triticum | |
| | | | | Aestivum | |
| | | | | Translating | |
| | | | | 80s | |
| | | | | Ribosome | |
| | | | | &gt; gi\|20805266\| | |
| | | | | dbj\|BAB92932.1\| | |
| | | | | putative 40s | |
| | | | | ribosomal | |
| | | | | protein S23 | |
| | | | | [Oryza | |
| | | | | sativa | |
| | | | | Japonica | |
| | | | | Group] | |
| | | | | &gt; gi\|20805267\| | |
| | | | | dbj\|BAB92933.1\| | |
| | | | | putative 40s | |
| | | | | ribosomal | |
| | | | | protein S23 | |
| | | | | [Oryza | |
| | | | | sativa | |
| | | | | Japonica | |
| | | | | Group] | |
| | | | | &gt; gi\|21671347\| | |
| | | | | dbj\|BAC02683.1\| | |
| | | | | putative 40s | |
| | | | | ribosomal | |
| | | | | protein S23 | |
| | | | | [Oryza | |
| | | | | sativa | |
| | | | | Japonica | |
| | | | | Group] | |
| | | | | &gt; gi\|21671348\| | |
| | | | | dbj\|BAC02684.1\| | |
| | | | | putative 40s | |
| | | | | ribosomal | |
| | | | | protein S23 | |
| | | | | [Oryza | |
| | | | | sativa | |
| | | | | Japonica | |
| | | | | Group] | |
| | | | | &gt; gi\|28876025\| | |
| | | | | gb\|AAO60034.1\| | |
| | | | | 40S | |
| | | | | ribosomal | |
| | | | | protein S23 | |
| | | | | [Oryza | |
| | | | | sativa | |
| | | | | Japonica | |
| | | | | Group] | |
| | | | | &gt; gi\|29124115\| | |
| | | | | gb\|AAO65856.1\| | |
| | | | | 40S | |
| | | | | ribosomal | |
| | | | | protein S23 | |
| | | | | [Oryza | |
| | | | | sativa | |
| | | | | Japonica | |
| | | | | Group] | |
| | | | | &gt; gi\|108711771\| | |
| | | | | gb\|ABF99566.1\| | |
| | | | | 40S | |
| | | | | ribosomal | |
| | | | | protein S23, | |
| | | | | putative, | |
| | | | | expressed | |
| | | | | [Oryza | |
| | | | | sativa | |
| | | | | Japonica | |
| | | | | Group] | |
| | | | | &gt; gi\|113534251\| | |
| | | | | dbj\|BAF06634.1\| | |
| | | | | Os01g0834500 | |
| | | | | [Oryza | |
| | | | | sativa | |
| | | | | Japonica | |
| | | | | Group] | |
| | | | | &gt; gi\|113550179\| | |
| | | | | dbj\|BAF13622.1\| | |
| | | | | Os03g0818400 | |
| | | | | [Oryza | |
| | | | | sativa | |
| | | | | Japonica | |
| | | | | Group] | |
| | | | | &gt; gi\|125528286\| | |
| | | | | gb\|EAY76400.1\| | |
| | | | | hypothetical | |
| | | | | protein | |
| | | | | OsI_04329 | |
| | | | | [Oryza | |
| | | | | sativa Indica | |
| | | | | Group] | |
| | | | | &gt; gi\|125546216\| | |
| | | | | gb\|EAY92355.1\| | |
| | | | | hypothetical | |
| | | | | protein | |
| | | | | OsI_14082 | |
| | | | | [Oryza | |
| | | | | sativa Indica | |
| | | | | Group] | |
| | | | | &gt; gi\|215697420\| | |
| | | | | dbj\|BAG91414.1\| | |
| | | | | unnamed | |
| | | | | protein | |
| | | | | product | |
| | | | | [Oryza | |
| | | | | sativa | |
| | | | | Japonica | |
| | | | | Group] | |
| | | | | &gt; gi\|215734943\| | |
| | | | | dbj\|BAG95665.1\| | |
| | | | | unnamed | |
| | | | | protein | |
| | | | | product | |
| | | | | [Oryza | |
| | | | | sativa | |
| | | | | Japonica | |
| | | | | Group] | |
| | | | | &gt; gi\|255673847\| | |
| | | | | dbj\|BAH91367.1\| | |
| | | | | Os01g0834601 | |
| | | | | [Oryza | |
| | | | | sativa | |
| | | | | Japonica | |
| | | | | Group] | |
| | | | | &gt; gi\|326501134\| | |
| | | | | dbj\|BAJ98798.1\| | |
| | | | | predicted | |
| | | | | protein | |
| | | | | [Hordeum | |
| | | | | vulgare | |
| | | | | subsp. | |
| | | | | vulgare] | |
| | | | | &gt; gi\|326506086\| | |
| | | | | dbj\|BAJ91282.1\| | |
| | | | | predicted | |
| | | | | protein | |
| | | | | [Hordeum | |
| | | | | vulgare | |
| | | | | subsp. | |
| | | | | vulgare] | |
| 1048 | 964 | Zea mays | 0.992957746 | hypothetical | 212722729 |
| | | | | protein | |
| | | | | LOC100192600 | |
| | | | | [Zea | |
| | | | | mays] | |
| | | | | &gt; gi\|242032479\| | |
| | | | | ref\|XP_002463634.1\| | |
| | | | | hypothetical | |
| | | | | protein | |
| | | | | SORBIDRAFT_01g003410 | |
| | | | | [Sorghum | |
| | | | | bicolor] | |
| | | | | &gt; gi\|242059153\| | |
| | | | | ref\|XP_002458722.1\| | |
| | | | | hypothetical | |
| | | | | protein | |
| | | | | SORBIDRAFT_03g039010 | |
| | | | | [Sorghum | |
| | | | | bicolor] | |
| | | | | &gt; gi\|242090801\| | |
| | | | | ref\|XP_002441233.1\| | |
| | | | | hypothetical | |
| | | | | protein | |
| | | | | SORBIDRAFT_09g022840 | |
| | | | | [Sorghum | |
| | | | | bicolor] | |
| | | | | &gt; gi\|194691088\| | |
| | | | | gb\|ACF79628.1\| | |
| | | | | unknown | |
| | | | | [Zea mays] | |
| | | | | &gt; gi\|194697612\| | |
| | | | | gb\|ACF82890.1\| | |
| | | | | unknown | |
| | | | | [Zea mays] | |
| | | | | &gt; gi\|194702740\| | |
| | | | | gb\|ACF85454.1\| | |
| | | | | unknown | |
| | | | | [Zea mays] | |
| | | | | &gt; gi\|195606082\| | |
| | | | | gb\|ACG24871.1\| | |
| | | | | 40S | |
| | | | | ribosomal | |
| | | | | protein S23 | |
| | | | | [Zea mays] | |
| | | | | &gt; gi\|195618728\| | |
| | | | | gb\|ACG31194.1\| | |
| | | | | 40S | |
| | | | | ribosomal | |
| | | | | protein S23 | |
| | | | | [Zea mays] | |
| | | | | &gt; gi\|195619636\| | |
| | | | | gb\|ACG31648.1\| | |
| | | | | 40S | |
| | | | | ribosomal | |
| | | | | protein S23 | |
| | | | | [Zea mays] | |
| | | | | &gt; gi\|195625318\| | |
| | | | | gb\|ACG34489.1\| | |
| | | | | 40S | |
| | | | | ribosomal | |
| | | | | protein S23 | |
| | | | | [Zea mays] | |
| | | | | &gt; gi\|195628702\| | |
| | | | | gb\|ACG36181.1\| | |
| | | | | 40S | |
| | | | | ribosomal | |
| | | | | protein S23 | |
| | | | | [Zea mays] | |
| | | | | &gt; gi\|195657679\| | |
| | | | | gb\|ACG48307.1\| | |
| | | | | 40S | |
| | | | | ribosomal | |
| | | | | protein S23 | |
| | | | | [Zea mays] | |
| | | | | &gt; gi\|238012290\| | |
| | | | | gb\|ACR37180.1\| | |
| | | | | unknown | |
| | | | | [Zea mays] | |
| | | | | &gt; gi\|241917488\| | |
| | | | | gb\|EER90632.1\| | |
| | | | | hypothetical | |
| | | | | protein | |
| | | | | SORBIDRAFT_01g003410 | |
| | | | | [Sorghum | |
| | | | | bicolor] | |
| | | | | &gt; gi\|241930697\| | |
| | | | | gb\|EES03842.1\| | |
| | | | | hypothetical | |
| | | | | protein | |
| | | | | SORBIDRAFT_03g039010 | |
| | | | | [Sorghum | |
| | | | | bicolor] | |
| | | | | &gt; gi\|241946518\| | |
| | | | | gb\|EES19663.1\| | |
| | | | | hypothetical | |
| | | | | protein | |
| | | | | SORBIDRAFT_09g022840 | |
| | | | | [Sorghum | |
| | | | | bicolor] | |
| 1049 | 965 | Zea mays | 0.985915493 | 40S | 195622025 |
| | | | | ribosomal | |
| | | | | protein S23 | |
| | | | | [Zea mays] | |
| 1050 | 966 | Elaeis | 0.978873239 | 40S | 192910819 |
| | | guineensis | | ribosomal | |
| | | | | protein S23 | |
| | | | | [Elaeis | |
| | | | | guineensis] | |
| | | | | &gt; gi\|192910894\| | |
| | | | | gb\|ACF06555.1\| | |
| | | | | 40S | |
| | | | | ribosomal | |
| | | | | protein S23 | |
| | | | | [Elaeis | |
| | | | | guineensis] | |
| 1051 | 967 | Elaeis | 0.971830986 | 40S | 192910821 |
| | | guineensis | | ribosomal | |
| | | | | protein S23 | |
| | | | | [Elaeis | |
| | | | | guineensis] | |
| 1052 | 968 | Solanum | 0.964788732 | unknown | 77999292 |
| | | tuberosum | | [Solanum | |
| | | | | tuberosum] | |
| | 969 | Ricinus | 0.964788732 | 40S | 255761086 |
| | | communis | | ribosomal | |
| | | | | protein S23, | |
| | | | | putative | |
| | | | | [Ricinus | |
| | | | | communis] | |
| | | | | &gt; gi\|255568414\| | |
| | | | | ref\|XP_002525181.1\| | |
| | | | | 40S | |
| | | | | ribosomal | |
| | | | | protein S23, | |
| | | | | putative | |
| | | | | [Ricinus | |
| | | | | communis] | |
| | | | | &gt; gi\|223535478\| | |
| | | | | gb\|EEF37147.1\| | |
| | | | | 40S | |
| | | | | ribosomal | |
| | | | | protein S23, | |
| | | | | putative | |
| | | | | [Ricinus | |
| | | | | communis] | |
| | | | | &gt; gi\|223536832\| | |
| | | | | gb\|EEF38471.1\| | |
| | | | | 40S | |
| | | | | ribosomal | |
| | | | | protein S23, | |
| | | | | putative | |
| | | | | [Ricinus | |
| | | | | communis] | |
| 1053 | 970 | Vitis | 0.964788732 | PREDICTED: | 225439887 |
| | | vinifera | | hypothetical | |
| | | | | protein | |
| | | | | [Vitis | |
| | | | | vinifera] | |
| 1054 | 971 | Zea mays | 1 | unknown | 223972764 |
| | | | | [Zea mays] | |
| | | | | &gt; gi\|223973927\| | |
| | | | | gb\|ACN31151.1\| | |
| | | | | unknown | |
| | | | | [Zea mays] | |
| | | | | &gt; gi\|323388595\| | |
| | | | | gb\|ADX60102.1\| | |
| | | | | SBP | |
| | | | | transcription | |
| | | | | factor [Zea | |
| | | | | mays] | |
| 1055 | 972 | Zea mays | 0.984615385 | hypothetical | 226530074 |
| | | | | protein | |
| | | | | LOC100278824 | |
| | | | | [Zea | |
| | | | | mays] | |
| | | | | &gt; gi\|195656399\| | |
| | | | | gb\|ACG47667.1\| | |
| | | | | hypothetical | |
| | | | | protein [Zea | |
| | | | | mays] | |
| | 973 | Sorghum | 0.870769231 | hypothetical | 255761094 |
| | | bicolor | | protein | |
| | | | | SORBIDRAFT_05g017510 | |
| | | | | [Sorghum | |
| | | | | bicolor] | |
| | | | | &gt; gi\|241936618\| | |
| | | | | gb\|EES09763.1\| | |
| | | | | hypothetical | |
| | | | | protein | |
| | | | | SORBIDRAFT_05g017510 | |
| | | | | [Sorghum | |
| | | | | bicolor] | |
| | 974 | Sorghum | 1 | hypothetical | 255761094 |
| | | bicolor | | protein | |
| | | | | SORBIDRAFT_03g025410 | |
| | | | | [Sorghum | |
| | | | | bicolor] | |
| | | | | &gt; gi\|241927774\| | |
| | | | | gb\|EES00919.1\| | |
| | | | | hypothetical | |
| | | | | protein | |
| | | | | SORBIDRAFT_03g025410 | |
| | | | | [Sorghum | |
| | | | | bicolor] | |
| 1056 | 975 | Zea mays | 0.893939394 | unknown | 223946882 |
| | | | | [Zea mays] | |
| 1057 | 976 | Zea mays | 0.890151515 | hypothetical | 226501393 |
| | | | | protein | |
| | | | | LOC100278489 | |
| | | | | [Zea | |
| | | | | mays] | |
| | | | | &gt; gi\|195653155\| | |
| | | | | gb\|ACG46045.1\| | |
| | | | | hypothetical | |
| | | | | protein [Zea | |
| | | | | mays] | |
| 1058 | 977 | Zea mays | 1 | unknown | 238908852 |
| | | | | [Zea mays] | |
| | | | | &gt; gi\|323388573\| | |
| | | | | gb\|ADX60091.1\| | |
| | | | | SBP | |
| | | | | transcription | |
| | | | | factor [Zea | |
| | | | | mays] | |
| 1059 | 978 | Zea mays | 0.997354497 | squamosa | 195651290 |
| | | | | promoter- | |
| | | | | binding-like | |
| | | | | protein 9 | |
| | | | | [Zea mays] | |
| | 979 | Sorghum | 0.828042328 | hypothetical | 255761094 |
| | | bicolor | | protein | |
| | | | | SORBIDRAFT_02g028420 | |
| | | | | [Sorghum | |
| | | | | bicolor] | |
| | | | | &gt; gi\|241925948\| | |
| | | | | gb\|EER99092.1\| | |
| | | | | hypothetical | |
| | | | | protein | |
| | | | | SORBIDRAFT_02g028420 | |
| | | | | [Sorghum | |
| | | | | bicolor] | |
| 1060 | 980 | Zea mays | 0.756613757 | hypothetical | 219363104 |
| | | | | protein | |
| | | | | LOC100217104 | |
| | | | | [Zea | |
| | | | | mays] | |
| | | | | &gt; gi\|194697718\| | |
| | | | | gb\|ACF82943.1\| | |
| | | | | unknown | |
| | | | | [Zea mays] | |
| 1061 | 981 | Zea mays | 1 | squamosa | 226529809 |
| | | | | promoter- | |
| | | | | binding-like | |
| | | | | protein 11 | |
| | | | | [Zea mays] | |
| | | | | &gt; gi\|195627850\| | |
| | | | | gb\|ACG35755.1\| | |
| | | | | squamosa | |
| | | | | promoter- | |
| | | | | binding-like | |
| | | | | protein 11 | |
| | | | | [Zea mays] | |
| | | | | &gt; gi\|195644948\| | |
| | | | | gb\|ACG41942.1\| | |
| | | | | squamosa | |
| | | | | promoter- | |
| | | | | binding-like | |
| | | | | protein 11 | |
| | | | | [Zea mays] | |
| | 982 | Sorghum | 0.876993166 | hypothetical | 255761094 |
| | | bicolor | | protein | |
| | | | | SORBIDRAFT_10g029190 | |
| | | | | [Sorghum | |
| | | | | bicolor] | |
| | | | | &gt; gi\|241917194\| | |
| | | | | gb\|EER90338.1\| | |
| | | | | hypothetical | |
| | | | | protein | |
| | | | | SORBIDRAFT_10g029190 | |
| | | | | [Sorghum | |
| | | | | bicolor] | |
| 1062 | 983 | Zea mays | 1 | hypothetical | 219363104 |
| | | | | protein | |
| | | | | LOC100217104 | |
| | | | | [Zea | |
| | | | | mays] | |
| | | | | &gt; gi\|194697718\| | |
| | | | | gb\|ACF82943.1\| | |
| | | | | unknown | |
| | | | | [Zea mays] | |
| | 984 | Sorghum | 0.817232376 | hypothetical | 255761094 |
| | | bicolor | | protein | |
| | | | | SORBIDRAFT_02g028420 | |
| | | | | [Sorghum | |
| | | | | bicolor] | |
| | | | | &gt; gi\|241925948\| | |
| | | | | gb\|EER99092.1\| | |
| | | | | hypothetical | |
| | | | | protein | |
| | | | | SORBIDRAFT_02g028420 | |
| | | | | [Sorghum | |
| | | | | bicolor] | |
| 1063 | 985 | Zea mays | 0.759791123 | unknown | 238908852 |
| | | | | [Zea mays] | |
| | | | | &gt; gi\|323388573\| | |
| | | | | gb\|ADX60091.1\| | |
| | | | | SBP | |
| | | | | transcription | |
| | | | | factor [Zea | |
| | | | | mays] | |
| 1064 | 986 | Zea mays | 0.757180157 | squamosa | 195651290 |
| | | | | promoter- | |
| | | | | binding-like | |
| | | | | protein 9 | |
| | | | | [Zea mays] | |
| 1065 | 987 | Zea mays | 1 | SBP-domain | 5931785 |
| | | | | protein 5 | |
| | | | | [Zea mays] | |
| | 988 | Sorghum | 0.854103343 | hypothetical | 255761094 |
| | | bicolor | | protein | |
| | | | | SORBIDRAFT_07g027740 | |
| | | | | [Sorghum | |
| | | | | bicolor] | |
| | | | | &gt; gi\|241941121\| | |
| | | | | gb\|EES14266.1\| | |
| | | | | hypothetical | |
| | | | | protein | |
| | | | | SORBIDRAFT_07g027740 | |
| | | | | [Sorghum | |
| | | | | bicolor] | |
| 1066 | 989 | Zea mays | 0.784194529 | unknown | 219885132 |
| | | | | [Zea mays] | |
| 1067 | 990 | Zea mays | 1 | MTA/SAH | 226529725 |
| | | | | nucleosidase | |
| | | | | [Zea mays] | |
| | | | | &gt; gi\|195658647\| | |
| | | | | gb\|ACG48791.1\| | |
| | | | | MTA/SAH | |
| | | | | nucleosidase | |
| | | | | [Zea mays] | |
| | | | | &gt; gi\|223973627\| | |
| | | | | gb\|ACN31001.1\| | |
| | | | | unknown | |
| | | | | [Zea mays] | |
| 1068 | 991 | Zea mays | 0.884462151 | unknown | 194699507 |
| | | | | [Zea mays] | |
| 1069 | 992 | Zea mays | 0.884462151 | MTA/SAH | 195640251 |
| | | | | nucleosidase | |
| | | | | [Zea mays] | |
| | 993 | Sorghum | 0.884462151 | hypothetical | 255761094 |
| | | bicolor | | protein | |
| | | | | SORBIDRA | |
| | | | | FT_07g026190 | |
| | | | | [Sorghum | |
| | | | | bicolor] | |
| | | | | &gt;gi\|241942163\| | |
| | | | | gb\|EES15308.1\| | |
| | | | | hypothetical | |
| | | | | protein | |
| | | | | SORBIDRA | |
| | | | | FT_07g026190 | |
| | | | | [Sorghum | |
| | | | | bicolor] | |
| 1070 | 994 | Zea mays | 0.900398406 | unknown | 223974590 |
| | | | | [Zea mays] | |
| 1071 | 995 | Oryza | 0.796812749 | Os06g0112200 | 115465985 |
| | | sativa | | [Oryza | |
| | | Japonica | | sativa | |
| | | Group | | Japonica | |
| | | | | Group] | |
| | | | | &gt;gi\|7363290\| | |
| | | | | dbj\|BAA93034.1\| | |
| | | | | methylthioadenosine/ | |
| | | | | S- | |
| | | | | adenosyl | |
| | | | | homocysteine | |
| | | | | nucleosidase | |
| | | | | [Oryza | |
| | | | | sativa | |
| | | | | Japonica | |
| | | | | Group] | |
| | | | | &gt;gi\|32352128\| | |
| | | | | dbj\|BAC78557.1\| | |
| | | | | hypothetical | |
| | | | | protein | |
| | | | | [Oryza | |
| | | | | sativa | |
| | | | | Japonica | |
| | | | | Group] | |
| | | | | &gt;gi\|113594632\| | |
| | | | | dbj\|BAF18506.1\| | |
| | | | | Os06g0112200 | |
| | | | | [Oryza | |
| | | | | sativa | |
| | | | | Japonica | |
| | | | | Group] | |
| | | | | &gt;gi\|125595804\| | |
| | | | | gb\|EAZ35584.1\| | |
| | | | | hypothetical | |
| | | | | protein | |
| | | | | OsJ_19870 | |
| | | | | [Oryza | |
| | | | | sativa | |
| | | | | Japonica | |
| | | | | Group] | |
| | | | | &gt;gi\|215694661\| | |
| | | | | dbj\|BAG89852.1\| | |
| | | | | unnamed | |
| | | | | protein | |
| | | | | product | |
| | | | | [Oryza | |
| | | | | sativa | |
| | | | | Japonica | |
| | | | | Group] | |
| | | | | &gt;gi\|215740802\| | |
| | | | | dbj\|BAG96958.1\| | |
| | | | | unnamed | |
| | | | | protein | |
| | | | | product | |
| | | | | [Oryza | |
| | | | | sativa | |
| | | | | Japonica | |
| | | | | Group] | |
| 1072 | 996 | Oryza | 0.792828685 | methylthioadenosine/ | 18087496 |
| | | sativa | | S- | |
| | | | | adenosyl | |
| | | | | homocysteine | |
| | | | | nucleosidase | |
| | | | | [Oryza | |
| | | | | sativa] | |
| 1073 | 997 | Oryza | 0.792828685 | mta/sah | 149390954 |
| | | sativa | | nucleosidase | |
| | | Indica | | [Oryza | |
| | | Group | | sativa Indica | |
| | | | | Group] | |
| 1074 | 998 | Hordeum | 0.780876494 | predicted | 326512819 |
| | | vulgare | | protein | |
| | | subsp. | | [Hordeum | |
| | | vulgare | | vulgare | |
| | | | | subsp. | |
| | | | | vulgare] | |
| | | | | &gt;gi\|326534118\| | |
| | | | | dbj\|BAJ89409.1\| | |
| | | | | predicted | |
| | | | | protein | |
| | | | | [Hordeum | |
| | | | | vulgare | |
| | | | | subsp. | |
| | | | | vulgare] | |
| | 999 | Oryza | 0.784860558 | hypothetical | 54362548 |
| | | sativa | | protein | |
| | | Indica | | OsI_21350 | |
| | | Group | | [Oryza | |
| | | | | sativa Indica | |
| | | | | Group] | |
| 1075 | 1000 | Zea mays | 1 | teosinte | 72536147 |
| | | subsp. | | glume | |
| | | mays | | architecture | |
| | | | | 1 [Zea mays | |
| | | | | subsp. mays] | |
| | 1001 | Zea mays | 0.983796296 | teosinte | |
| | | subsp. | | glume | |
| | | mays | | architecture | |
| | | | | 1 [Zea mays | |
| | | | | subsp. mays] | |
| 1076 | 1002 | Zea mays | 0.990740741 | teosinte | 62467433 |
| | | subsp. | | glume | |
| | | mays | | architecture | |
| | | | | 1 [Zea mays | |
| | | | | subsp. mays] | |
| | | | | &gt;gi\|62467440\| | |
| | | | | gb\|AAX83874.1\| | |
| | | | | teosinte | |
| | | | | glume | |
| | | | | architecture | |
| | | | | 1 [Zea mays | |
| | | | | subsp. mays] | |
| | 1003 | Sorghum | 0.800925926 | hypothetical | 255761094 |
| | | bicolor | | protein | |
| | | | | SORBIDRAFT_07g026220 | |
| | | | | [Sorghum | |
| | | | | bicolor] | |
| | | | | &gt;gi\|241942165\| | |
| | | | | gb\|EES15310.1\| | |
| | | | | hypothetical | |
| | | | | protein | |
| | | | | SORBIDRAFT_07g026220 | |
| | | | | [Sorghum | |
| | | | | bicolor] | |
| | 1004 | Sorghum | 1 | hypothetical | 255761094 |
| | | bicolor | | protein | |
| | | | | SORBIDRAFT_02g038960 | |
| | | | | [Sorghum | |
| | | | | bicolor] | |
| | | | | &gt;gi\|241926544\| | |
| | | | | gb\|EER99688.1\| | |
| | | | | hypothetical | |
| | | | | protein | |
| | | | | SORBIDRAFT_02g038960 | |
| | | | | [Sorghum | |
| | | | | bicolor] | |
| 1077 | 1005 | Zea mays | 0.897009967 | nuclear | 195634708 |
| | | | | transcription | |
| | | | | factor Y | |
| | | | | subunit A-3 | |
| | | | | [Zea mays] | |
| 1078 | 1006 | Zea mays | 0.890365449 | hypothetical | 212723473 |
| | | | | protein | |
| | | | | LOC100194182 | |
| | | | | [Zea | |
| | | | | mays] | |
| | | | | &gt;gi\|194695138\| | |
| | | | | gb\|ACF81653.1\| | |
| | | | | unknown | |
| | | | | [Zea mays] | |
| | | | | &gt;gi\|195625280\| | |
| | | | | gb\|ACG34470.1\| | |
| | | | | nuclear | |
| | | | | transcription | |
| | | | | factor Y | |
| | | | | subunit A-3 | |
| | | | | [Zea mays] | |
| 1079 | 1007 | Zea mays | 0.887043189 | unknown | 224028448 |
| | | | | [Zea mays] | |
| 1080 | 1008 | Zea mays | 0.853820598 | unknown | 194699259 |
| | | | | [Zea mays] | |
| 1081 | 1009 | Zea mays | 0.853820598 | nuclear | 195609807 |
| | | | | transcription | |
| | | | | factor Y | |
| | | | | subunit A-3 | |
| | | | | [Zea mays] | |
| 1082 | 1010 | Zea mays | 0.850498339 | nuclear | 226499901 |
| | | | | transcription | |
| | | | | factor Y | |
| | | | | subunit A-3 | |
| | | | | [Zea mays] | |
| | | | | &gt;gi\|195609780\| | |
| | | | | gb\|ACG26720.1\| | |
| | | | | nuclear | |
| | | | | transcription | |
| | | | | factor Y | |
| | | | | subunit A-3 | |
| | | | | [Zea mays] | |
| 1083 | 1011 | Zea mays | 1 | hypothetical | 212723473 |
| | | | | protein | |
| | | | | LOC100194182 | |
| | | | | [Zea | |
| | | | | mays] | |
| | | | | &gt;gi\|194695138\| | |
| | | | | gb\|ACF81653.1\| | |
| | | | | unknown | |
| | | | | [Zea mays] | |
| | | | | &gt;gi\|195625280\| | |
| | | | | gb\|ACG34470.1\| | |
| | | | | nuclear | |
| | | | | transcription | |
| | | | | factor Y | |
| | | | | subunit A-3 | |
| | | | | [Zea mays] | |
| 1084 | 1012 | Zea mays | 0.996666667 | unknown | 224028448 |
| | | | | [Zea mays] | |
| 1085 | 1013 | Zea mays | 0.98 | nuclear | 195634708 |
| | | | | transcription | |
| | | | | factor Y | |
| | | | | subunit A-3 | |
| | | | | [Zea mays] | |
| | 1014 | Sorghum | 0.893333333 | hypothetical | 255761094 |
| | | bicolor | | protein | |
| | | | | SORBIDRAFT_02g038960 | |
| | | | | [Sorghum | |
| | | | | bicolor] | |
| | | | | &gt;gi\|241926544\| | |
| | | | | gb\|EER99688.1\| | |
| | | | | hypothetical | |
| | | | | protein | |
| | | | | SORBIDRAFT_02g038960 | |
| | | | | [Sorghum | |
| | | | | bicolor] | |
| 1086 | 1015 | Zea mays | 0.853333333 | unknown | 194699259 |
| | | | | [Zea mays] | |
| 1087 | 1016 | Zea mays | 0.856666667 | nuclear | 195609807 |
| | | | | transcription | |
| | | | | factor Y | |
| | | | | subunit A-3 | |
| | | | | [Zea mays] | |
| 1088 | 1017 | Zea mays | 0.853333333 | nuclear | 226499901 |
| | | | | transcription | |
| | | | | factor Y | |
| | | | | subunit A-3 | |
| | | | | [Zea mays] | |
| | | | | &gt;gi\|195609780\| | |
| | | | | gb\|ACG26720.1\| | |
| | | | | nuclear | |
| | | | | transcription | |
| | | | | factor Y | |
| | | | | subunit A-3 | |
| | | | | [Zea mays] | |
| 1089 | 1018 | Zea mays | 1 | nuclear | 226502984 |
| | | | | transcription | |
| | | | | factor Y | |
| | | | | subunit A-3 | |
| | | | | [Zea mays] | |
| | | | | &gt;gi\|195624530\| | |
| | | | | gb\|ACG34095.1\| | |
| | | | | nuclear | |
| | | | | transcription | |
| | | | | factor Y | |
| | | | | subunit A-3 | |
| | | | | [Zea mays] | |
| | 1019 | Sorghum | 0.814545455 | hypothetical | 255761094 |
| | | bicolor | | protein | |
| | | | | SORBIDRAFT_04g034760 | |
| | | | | [Sorghum | |
| | | | | bicolor] | |
| | | | | &gt;gi\|241934478\| | |
| | | | | gb\|EES07623.1\| | |
| | | | | hypothetical | |
| | | | | protein | |
| | | | | SORBIDRAFT_04g034760 | |
| | | | | [Sorghum | |
| | | | | bicolor] | |
| | 1020 | Sorghum | 1 | hypothetical | 255761094 |
| | | bicolor | | protein | |
| | | | | SORBIDRAFT_01g004290 | |
| | | | | [Sorghum | |
| | | | | bicolor] | |
| | | | | &gt;gi\|241917544\| | |
| | | | | gb\|EER90688.1\| | |
| | | | | hypothetical | |
| | | | | protein | |
| | | | | SORBIDRAFT_01g004290 | |
| | | | | [Sorghum | |
| | | | | bicolor] | |
| 1090 | 1021 | Zea mays | 0.836633663 | unknown | 194696171 |
| | | | | [Zea mays] | |

| | Protein | Homologue | miR | | |
|---|---|---|---|---|---|
| Nucleotide | seq id | NCBI | Binding | miR | miR |
| seq id no: | no: | Accession | Position | sequence | name |
| | 927 | XP_002463896 | 426-446 | GTGAAG | zma- |
| | | | | TGTTTG | miR395b |
| | | | | GGGGAA | |
| | | | | CTC/4 | |
| 1022 | 928 | ACN28609 | | | |
| 1023 | 929 | ACN34023 | | | |
| 1024 | 930 | ACG45192 | | | |
| 1025 | 931 | NP_001104877 | | | |
| | 932 | EAY91825 | | | |
| 1026 | 933 | NP_001051234 | | | |
| 1027 | 934 | BAK05662 | | | |
| 1028 | 935 | BAA36274 | | | |
| | 936 | EAZ28548 | | | |
| | 937 | XP_002441904 | 352-372 | | |
| 1029 | 938 | NP_001066285 | | | |
| | 939 | EEE52851 | | | |
| | 940 | EEC68940 | | | |
| 1030 | 941 | ACN34023 | 616-636 | | |
| 1031 | 942 | NP_001104877 | | | |
| 1032 | 943 | ACN28609 | | | |
| 1033 | 944 | ACG45192 | | | |
| | 945 | XP_002463896 | | | |
| 1034 | 946 | BAK05662 | | | |
| | 947 | EAY91825 | | | |
| 1035 | 948 | NP_001051234 | | | |
| 1036 | 949 | BAA36274 | | | |
| | 950 | EAZ28548 | | | |
| | 951 | XP_002452486 | 1000-1020 | GGAATC | zma- |
| | | | | TTGATG | miR172e |
| | | | | ATGCTG | |
| | | | | CAT/3 | |
| 1037 | 952 | ACN31224 | | | |
| 1038 | 953 | NP_001143596 | | | |
| 1039 | 954 | NP_001144184 | | | |
| 1040 | 955 | NP_001047497 | | | |
| 1041 | 956 | BAJ96123 | | | |
| 1042 | 957 | ABR19871 | 869-889 | | |
| 1043 | 958 | ABR19870 | | | |
| | 959 | XP_002459580 | 1539-1559 | | |
| 1044 | 960 | NP_001139539 | | | |
| 1045 | 961 | ACN58224 | | | |
| 1046 | 962 | ACG46304 | | | |
| 1047 | 963 | NP_001044720 | 1121-1141 | | |
| 1048 | 964 | NP_001131287 | | | |
| 1049 | 965 | ACG32843 | | | |
| 1050 | 966 | ACF06518 | | | |
| 1051 | 967 | ACF06519 | | | |
| 1052 | 968 | ABB16993 | | | |
| | 969 | XP_002523902 | | | |
| 1053 | 970 | XP_002279025 | | | |
| 1054 | 971 | ACN30570 | 882-902 | AGAAGA | zma- |
| | | | | GAGAGA | miR529 |
| | | | | GTACAG | |
| | | | | CCT/1 | |
| 1055 | 972 | NP_001145445 | | | |
| | 973 | XP_002450775 | | | |
| | 974 | XP_002455799 | 45-65 | | |
| 1056 | 975 | ACN27525 | | | |
| 1057 | 976 | NP_001145223 | | | |
| 1058 | 977 | ACF86782 | 9910, 6-916 | | |
| 1059 | 978 | ACG45113 | | | |
| | 979 | XP_002462571 | | | |
| 1060 | 980 | NP_001136945 | | | |
| 1061 | 981 | NP_001149534 | 1348-1368 | | |
| | 982 | XP_002438971 | | | |
| 1062 | 983 | NP_001136945 | 973-993 | | |
| | 984 | XP_002462571 | | | |
| 1063 | 985 | ACF86782 | | | |
| 1064 | 986 | ACG45113 | | | |
| 1065 | 987 | CAB56631 | 558-578 | | |
| | 988 | XP_002444771 | | | |
| 1066 | 989 | ACL52941 | | | |
| 1067 | 990 | NP_001152658 | 1410-1430 | | |
| 1068 | 991 | ACF83838 | | | |
| 1069 | 992 | ACG39594 | | | |
| | 993 | XP_002445813 | | | |
| 1070 | 994 | ACN31483 | | | |
| 1071 | 995 | NP_001056592 | | | |
| 1072 | 996 | AAL58883 | | | |
| 1073 | 997 | ABR25495 | | | |
| 1074 | 998 | BAK03317 | | | |
| | 999 | EAY99382 | | | |
| 1075 | 1000 | AAX83872 | 1197-1217 | | |
| | 1001 | AAX83875 | | | |
| 1076 | 1002 | AAX83873 | | | |
| | 1003 | XP_002445815 | | | |
| | 1004 | XP_002463167 | 1112-1132 | TAGCCA | zma- |
| | | | | GGGATG | miR1691 |
| | | | | ATTTGC | |
| | | | | CTG/2 | |
| 1077 | 1005 | ACG36823 | | | |
| 1078 | 1006 | NP_001132701 | | | |
| 1079 | 1007 | ACN33300 | | | |
| 1080 | 1008 | ACF83714 | | | |
| 1081 | 1009 | ACG26734 | | | |
| 1082 | 1010 | NP_001147311 | | | |
| 1083 | 1011 | NP_001132701 | 1108-1128 | | |
| 1084 | 1012 | ACN33300 | | | |
| 1085 | 1013 | ACG36823 | | | |
| | 1014 | XP_002463167 | | | |
| 1086 | 1015 | ACF83714 | | | |
| 1087 | 1016 | ACG26734 | | | |
| 1088 | 1017 | NP_001147311 | | | |
| 1089 | 1018 | NP_001149075 | 979-999 | | |
| | 1019 | XP_002454647 | | | |
| | 1020 | XP_002463690 | 946-966 | | |
| 1090 | 1021 | ACF82170 | | | |

### Example 4

### Verification of Expression of miRNAs Associated with Increased NUE

[0293] Following identification of dsRNAs potentially involved in improvement of maize NUE using bioinformatics tools, as described in Examples 1-2 above, the actual mRNA levels were determined using reverse transcription assay followed by quantitative Real-Time PCR (qRT-PCR) analysis. RNA levels were compared between different tissues, developmental stages, growth conditions and/or genetic backgrounds incorporated. A correlation analysis between mRNA levels in different experimental conditions/genetic backgrounds was applied and used as evidence for the role of the gene in the plant.

[0294] Methods

[0295] Mobile nutrients such as N reach their targets and are then recycled, often executed in the form of simultaneous import and export of the nutrients from leaves. This dynamic nutrient cycling is termed remobilization or retranslocation, and thus leaf analyses are highly recommended. For that reason, root and leaf samples were freshly excised from maize plants grown as described above on Murashige-Skoog without Ammonium Nitrate (NH₄NO₃) (Duchefa). Experimental plants were grown either under optimal ammonium nitrate concentrations (100%) and used as a control group, or under stressful conditions of 10% or 1% ammonium nitrate used as stress-induced groups. Total RNA was extracted from the different tissues, using mirVana™ commercial kit (Ambion) following the protocol provided by the manufacturer. For measurement and verification of messenger RNA (mRNA) expression level of all genes, reverse transcription followed by quantitative real time PCR (qRT-PCR) was performed on total RNA extracted from each plant tissue (i.e., roots and leaves) from each experimental group as described above. To elaborate, reverse transcription was performed on 1 μg total RNA, using a miScript Reverse Transcriptase kit (Qiagen), following the protocol suggested by the manufacturer. Quantitative RT-PCR was performed on cDNA (0.1 ng/μl final concentration), using a miScript SYBR GREEN PCR (Qiagen) forward (based on the miR sequence itself) and reverse primers (supplied with the kit). All qRT-PCR reactions were performed in triplicates using an ABI7500 real-time PCR machine, following the recommended protocol for the machine. To normalize, the expression level of miRNAs associated with enhanced NUE between the different tissues and growth conditions of the maize plants, normalizer miRNAs were used for comparison. Normalizer miRNAs, which are miRNAs with unchanged expression level between tissues and growth conditions, were custom selected for each experiment. The normalization procedure consisted of second-degree polynomial fitting to a reference data (which is the median vector of all the data—excluding outliers) as described by Rosenfeld et al (2008, Nat Biotechnol, 26(4):462-469). A summary of primers for the differential miRNAs that was used in the qRT-PCR analysis is presented in Table 7a below. The results of the qRT-PCR analyses under different nitrogen concentrations (1% and 10% versus optimal 100%) are presented in Tables 7b-d below.

TABLE 7a
Primers of Small RNAs used for qRT-PCR Validation Analysis.

| Primer Length | Primer Sequence/SEQ ID NO: | Small RNA Name |
|---|---|---|
| 24 | GGCAGAAGAGAGAGAGTACAGCCT/1091 | Zma-miR529 |
| 23 | GCTAGCCAGGGATGATTTGCCTG/1092 | Zma-miR169l |
| 21 | AGGATGCTGACGCAATGGGAT/1093 | Predicted zma mir 48486 |
| 25 | TGGCTTAGATGACCATCAGCAAACA/1094 | Zma-miR827 |
| 23 | GCGTGAAGTGTTTGGGGGAACTC/1095 | Zma-miR395b |
| 22 | CTAGCCAAGCATGATTTGCCCG/1096 | Predicted zma mir 50601 |
| 23 | CAGGATGTGAGGCTATTGGGGAC/1097 | Predicted zma mir 48492 |
| 22 | CCAAGTCGAGGGCAGACCAGGC/1098 | Predicted zma mir 48879 |
| 21 | ATTCACGGGGACGAACCTCCT/1099 | Mtr-miR2647a |
| 24 | GGCGGAATCTTGATGATGCTGCAT/1100 | Zma-miR172e |

TABLE 7b
Results of qRT-PCR Validation Analysis on Differential Small RNAs-
1% Nitrogen vs. Control (100% Nitrogen).

| | Fold | | | |
|---|---|---|---|---|
| p-value | Change | Direction | Sequence/SEQ ID NO: | miR Name |
| 3.20E−03 | 1.68 | up | TTAGATGACCATCAGCAAACA/10 | zma-miR827 |
| 3.60E−03 | 1.96 | up | CCAAGTCGAGGGCAGACCAGGC/7 | Predicted zma mir 48879 |
| 4.40E−02 | 1.55 | up | AGGATGCTGACGCAATGGGAT/9 | Predicted zma mir 48486 |
| 1.30E−03 | −3.16 | down | GTGAAGTGTTTGGGGGAACTC/4 | zma-miR395b |

TABLE 7c
Results of qRT-PCR Validation Analysis on Differential Small RNAs-
1% Nitrogen vs. 10% Nitrogen.

| | Fold | | | |
|---|---|---|---|---|
| p-value | Change | Direction | Sequence/SEQ ID NO: | miR Name |
| 2.30E−02 | 2.42 | up | AGGATGCTGACGCAATGGGAT/9 | Predicted zma mir 48486 |
| 1.30E−02 | 1.62 | up | TTAGATGACCATCAGCAAACA/10 | zma-miR827 |
| 4.60E−02 | 1.57 | up | AGGATGTGAGGCTATTGGGGAC/6 | Predicted zma mir 48492 |

TABLE 7d
Results of qRT-PCR Validation Analysis on Differential Small RNAs-
10% Nitrogen vs. Control (100% Nitrogen).

| | Fold | | | |
|---|---|---|---|---|
| p-value | Change | Direction | Sequence/SEQ ID NO: | miR Name |
| 4.50E−03 | −3.71 | down | GTGAAGTGTTTGGGGGAACTC/4 | zma-miR395b |

### Example 5

### Gene Cloning and Creation of Binary Vectors for Plant Expression

[0296] Cloning Strategy—the best validated miRNAs are cloned into pORE-E1 binary vectors for the generation of transgenic plants. The full-length open reading frame (ORF) comprising of the hairpin sequence of each selected miRNA, is synthesized by Genscript (Israel). The resulting clone is digested with appropriate restriction enzymes and inserted into the Multi Cloning Site (MCS) of a similarly digested binary vector through ligation using T4 DNA ligase enzyme (Promega, Madison, Wis., USA).

### Example 6

### Generation of Transgenic Model Plants Expressing the NUE Small RNAs

[0297] Arabidoposis thaliana transformation is performed using the floral dip procedure following a slightly modified version of the published protocol (ref). Briefly, TO Plants are planted in small pots filled with soil. The pots are covered with aluminum foil and a plastic dome, kept at 4° C. for 3-4 days, then uncovered and incubated in a growth chamber at 24° C. under 16 hr light:8 hr dark cycles. A week prior to transformation all individual flowering stems are removed to allow for growth of multiple flowering stems instead. A single colony of Agrobacterium (GV3101) carrying the binary vectors (pORE-E1), harboring the NUE miRNA hairpin sequences with additional flanking sequences both upstream and downstream of it, is cultured in LB medium supplemented with kanamycin (50 mg/L) and gentamycin (25 mg/L). Three days prior to transformation, each culture is incubated at 28° C. for 48 hrs, shaking at 180 rpm. The starter culture is split the day before transformation into two cultures, which are allowed to grow further at 28° C. for 24 hours at 180 rpm. Pellets containing the agrobacterium cells are obtained by centrifugation of the cultures at 5000 rpm for 15 minutes. The pellets are resuspended in an infiltration medium (10 mM MgCl₂, 5% sucrose, 0.044 μM BAP (Sigma) and 0.03% Tween 20) in double-distilled water.

[0298] Transformation of T0 plants is performed by inverting each plant into the Agrobacterium suspension, keeping the flowering stem submerged for 5 minutes. Following inoculation, each plant is blotted dry for 5 minutes on both sides, and placed sideways on a fresh covered tray for 24 hours at 22° C. Transformed (transgenic) plants are then uncovered and transferred to a greenhouse for recovery and maturation. The transgenic T0 plants are grown in the greenhouse for 3-5 weeks until the seeds are ready, which are then harvested from plants and kept at room temperature until sowing.

### Example 7

### Selection of Transgenic Arabidopsis Plants Expressing the NUE Genes According to Expression Level

[0299] Arabidopsis seeds are sown and sprayed with Basta (Bayer) on 1-2 weeks old seedlings, at least twice every few days. Only resistant plants, which are heterozygous for the transgene, survive. PCR on the genomic gene sequence is performed on the surviving seedlings using primers pORE-F2 (fwd, 5′-TTTAGCGATGAACTTCACTC-3′, SEQ ID NO: 20) and a custom designed reverse primer based on each miR's sequence.

### Example 8

### Evaluating Changes in Root Architecture in Transgenic Plants

[0300] Many key traits in modern agriculture can be explained by changes in the root architecture of the plant. Root size and depth have been shown to logically correlate with drought tolerance, since deeper root systems can access water stored in deeper soil layers. Correspondingly, a highly branched root system provides better coverage of the soil and therefore can effectively absorb all micro and macronutrients available, resulting in enhanced NUE.

[0301] To test whether the transgenic plants produce a modified root structure, plants can be grown in agar plates placed vertically. A digital picture of the plates is taken every few days and the maximal length and total area covered by the plant roots are assessed. From every construct created, several independent transformation events are checked in replicates. To assess significant differences between root features, a statistical test, such as a Student's t-test, is employed in order to identify enhanced root features and to provide a statistical value to the findings.

### Example 9

### Testing for Increased Nitrogen Use Efficiency (NUE)

[0302] To analyze whether the transgenic Arabidopsis plants are more responsive to nitrogen, plants are grown in two different nitrogen concentrations: (1) optimal nitrogen concentration (100% NH₄NO₃, which corresponds to 20.61 mM) or (2) nitrogen deficient conditions (1% or 10% NH₄NO₃, which corresponds to 0.2 and 2.06 mM, respectively). Plants are allowed to grow until seed production followed by an analysis of their overall size, time to flowering, yield, protein content of shoot and/or grain, and seed production. The parameters checked can be the overall size of the plant, wet and dry weight, the weight of the seeds yielded, the average seed size and the number of seeds produced per plant. Other parameters that may be tested are: the chlorophyll content of leaves (as nitrogen plant status and the degree of leaf greenness are highly correlated), amino acid and the total protein content of the seeds or other plant parts such as leaves or shoots and oil content. Transformed plants not exhibiting substantial physiological and/or morphological effects, or exhibiting higher measured parameters levels than wild-type plants, are identified as nitrogen use efficient plants.

### Example 10

### Method for Generating Transgenic Maize Plants with Enhanced or Reduced microRNA Regulation of Target Genes

[0303] Target prediction enables two contrasting strategies; an enhancement (positive) or a reduction (negative) of microRNA regulation. Both these strategies have been used in plants and have resulted in significant phenotype alterations. For complete in-vivo assessment of the phenotypic effects of the differential miRNAs in this invention, the inventors implement both over-expression and down-regulation methods on all miRNAs found to associate with NUE as listed in Table 1. Reduction of miRNA regulation of target genes can be accomplished in one of two approaches:

### Expressing a microRNA-Resistant Target

[0304] In this method, silent mutations are introduced in the microRNA binding site of the target gene so that the DNA and resulting RNA sequences are changed to prevent microRNA binding, but the amino acid sequence of the protein is unchanged.

### Expressing a Target-Mimic Sequence

[0305] Plant microRNAs usually lead to cleavage of their targeted gene, with this cleavage typically occurring between bases 10 and 11 of the microRNA. This position is therefore especially sensitive to mismatches between the microRNA and the target. It was found that expressing a DNA sequence that could potentially be targeted by a microRNA, but contains three extra nucleotides (ATC) between the two nucleotides that are predicted to hybridize with bases 10-11 of the microRNA (thus creating a bulge in that position), can inhibit the regulation of that microRNA on its native targets (Franco-Zorilla J M et al., Nat Genet 2007; 39(8):1033-1037).

[0306] This type of sequence is referred to as a “target-mimic”. Inhibition of the microRNA regulation is presumed to occur through physically capturing the microRNA by the target-mimic sequence and titering-out the microRNA, thereby reducing its abundance. This method was used to reduce the amount and, consequentially, the regulation of microRNA 399 in Arabidopsis.

TABLE 8
miRNA-Resistant Target Examples for Selected down-regulated miRNAs of
the Invention.

| | Mutated | ORF | Original | | | | | | |
|---|---|---|---|---|---|---|---|---|---|
| NCBI | Nucleo- | Nucleo- | Nucleo- | | | | | MiR | |
| MiR | tide | tide | tide | Protein | | Homolog | | sequence/ | |
| Binding | SEQ ID | SEQ ID | SEQ ID | SEQ ID | | NCBI | WMD3 | SEQ ID | MiR |
| Site | NO: | NO: | NO: | NO: | Organism | Accession | Targets | NO: | name |
| | | | | | | | miR | TTAGAT | zma- |
| | | | | | | | binding | GACCAT | miR827 |
| | | | | | | | site: | CAGCAA | |
| | | | | | | | TC372606 | ACA/10 | |
| | | | | | | | -> not | | |
| | | | | | | | found on | | |
| | | | | | | | the master | | |
| | | | | | | | seq | | |
| | | 1103 | 1102 | 1101 | Zea mays | NP_ | TC372597 | | |
| | | | | | | 001105530 | | | |
| 1825- | 1104 | | | | | | | | |
| 1845 | | | | | | | | | |
| 1825- | 1105 | | | | | | | | |
| 1845 | | | | | | | | | |
| 1825- | 1106 | | | | | | | | |
| 1845 | | | | | | | | | |
| 1825- | 1107 | | | | | | | | |
| 1845 | | | | | | | | | |
| 1825- | 1108 | | | | | | | | |
| 1845 | | | | | | | | | |
| 1825- | 1109 | | | | | | | | |
| 1845 | | | | | | | | | |
| 1825- | 1110 | | | | | | | | |
| 1845 | | | | | | | | | |
| 1825- | 1111 | | | | | | | | |
| 1845 | | | | | | | | | |
| 1825- | 1112 | | | | | | | | |
| 1845 | | | | | | | | | |
| 1825- | 1113 | | | | | | | | |
| 1845 | | | | | | | | | |
| | | 1116 | 1115 | 1114 | Zea mays | NP_ | GRMZM2 | | |
| | | | | | | 001130294 | G013176_ | | |
| | | | | | | | T02 | | |
| 1017- | 1117 | | | | | | | | |
| 1037 | | | | | | | | | |
| 1017- | 1118 | | | | | | | | |
| 1037 | | | | | | | | | |
| 1017- | 1119 | | | | | | | | |
| 1037 | | | | | | | | | |
| 1017- | 1120 | | | | | | | | |
| 1037 | | | | | | | | | |
| 1017- | 1121 | | | | | | | | |
| 1037 | | | | | | | | | |
| 1017- | 1122 | | | | | | | | |
| 1037 | | | | | | | | | |
| 1017- | 1123 | | | | | | | | |
| 1037 | | | | | | | | | |
| 1017- | 1124 | | | | | | | | |
| 1037 | | | | | | | | | |
| | | | | | | | target: | AGGATG | Predicted |
| | | | | | | | TC422488 | CTGACG | zma mir |
| | | | | | | | of Mir | CAATGG | 48486 |
| | | | | | | | Predicted | GAT/9 | |
| | | | | | | | zma mir | | |
| | | | | | | | 48486 is | | |
| | | | | | | | located in | | |
| | | | | | | | UTR | | |

TABLE 9
miRNA-Resistant Target Examples for Selected up-regulated miRNAs of
the Invention.

| | Mutated | ORF | Original | | | | | | |
|---|---|---|---|---|---|---|---|---|---|
| NCBI | Nucleo- | Nucleo- | Nucleo- | | | | | | |
| Mir | tide | tide | tide | Protein | | Homolog | | | |
| Binding | SEQ ID | SEQ ID | SEQ ID | SEQ ID | | NCBI | WMD3 | MiR | |
| Site | NO: | NO: | NO: | NO: | Organism | Accession | Targets | sequence | MiR name |
| | | 1127 | 1126 | 1125 | Zea mays | ACN34023 | GRMZM2 | GTGAA | zma- |
| | | | | | | | G051270_ | GTGTTT | miR395b |
| | | | | | | | T01 | GGGGG | |
| | | | | | | | | AACTC/4 | |
| 527- | 1128 | | | | | | | | |
| 547 | | | | | | | | | |
| 527- | 1129 | | | | | | | | |
| 547 | | | | | | | | | |
| 527- | 1130 | | | | | | | | |
| 547 | | | | | | | | | |
| 527- | 1131 | | | | | | | | |
| 547 | | | | | | | | | |
| 527- | 1132 | | | | | | | | |
| 547 | | | | | | | | | |
| 527- | 1133 | | | | | | | | |
| 547 | | | | | | | | | |
| 527- | 1134 | | | | | | | | |
| 547 | | | | | | | | | |
| | | 1137 | 1136 | 1135 | Zea mays | ACN30570 | TC441933 | AGAAG | zma- |
| | | | | | | | | AGAGA | miR529 |
| | | | | | | | | GAGTAC | |
| | | | | | | | | AGCCT/1 | |
| 889- | 1138 | | | | | | | | |
| 909 | | | | | | | | | |
| 889- | 1139 | | | | | | | | |
| 909 | | | | | | | | | |
| 889- | 1140 | | | | | | | | |
| 909 | | | | | | | | | |
| 889- | 1141 | | | | | | | | |
| 909 | | | | | | | | | |
| 889- | 1142 | | | | | | | | |
| 909 | | | | | | | | | |
| 889- | 1143 | | | | | | | | |
| 909 | | | | | | | | | |
| 889- | 1144 | | | | | | | | |
| 909 | | | | | | | | | |
| 889- | 1145 | | | | | | | | |
| 909 | | | | | | | | | |
| 889- | 1146 | | | | | | | | |
| 909 | | | | | | | | | |
| 889- | 1147 | | | | | | | | |
| 909 | | | | | | | | | |
| | | 1150 | 1149 | 1148 | Zea mays | ACF86782 | TC374118 | | |
| 923- | 1151 | | | | | | | | |
| 943 | | | | | | | | | |
| 923- | 1152 | | | | | | | | |
| 943 | | | | | | | | | |
| 923- | 1153 | | | | | | | | |
| 943 | | | | | | | | | |
| 923- | 1154 | | | | | | | | |
| 943 | | | | | | | | | |
| 923- | 1155 | | | | | | | | |
| 943 | | | | | | | | | |
| 923- | 1156 | | | | | | | | |
| 943 | | | | | | | | | |
| 923- | 1157 | | | | | | | | |
| 943 | | | | | | | | | |
| 923- | 1158 | | | | | | | | |
| 943 | | | | | | | | | |
| 923- | 1159 | | | | | | | | |
| 943 | | | | | | | | | |
| 923- | 1160 | | | | | | | | |
| 943 | | | | | | | | | |
| | | 1163 | 1162 | 1161 | Zea mays | NP_ | GRMZM2 | | |
| | | | | | | 001149534 | G414805_ | | |
| | | | | | | | T04 | | |
| 1396- | 1164 | | | | | | | | |
| 1416 | | | | | | | | | |
| 1396- | 1165 | | | | | | | | |
| 1416 | | | | | | | | | |
| 1396- | 1166 | | | | | | | | |
| 1416 | | | | | | | | | |
| 1396- | 1167 | | | | | | | | |
| 1416 | | | | | | | | | |
| 1396- | 1168 | | | | | | | | |
| 1416 | | | | | | | | | |
| 1396- | 1169 | | | | | | | | |
| 1416 | | | | | | | | | |
| 1396- | 1170 | | | | | | | | |
| 1416 | | | | | | | | | |
| 1396- | 1171 | | | | | | | | |
| 1416 | | | | | | | | | |
| 1396- | 1172 | | | | | | | | |
| 1416 | | | | | | | | | |
| 1396- | 1173 | | | | | | | | |
| 1416 | | | | | | | | | |
| | | 1176 | 1175 | 1174 | Zea mays | NP_ | GRMZM2 | | |
| | | | | | | 001136945 | G126018_ | | |
| | | | | | | | T01 | | |
| 926- | 1177 | | | | | | | | |
| 946 | | | | | | | | | |
| 926- | 1178 | | | | | | | | |
| 946 | | | | | | | | | |
| 926- | 1179 | | | | | | | | |
| 946 | | | | | | | | | |
| 926- | 1180 | | | | | | | | |
| 946 | | | | | | | | | |
| 926- | 1181 | | | | | | | | |
| 946 | | | | | | | | | |
| 926- | 1182 | | | | | | | | |
| 946 | | | | | | | | | |
| 926- | 1183 | | | | | | | | |
| 946 | | | | | | | | | |
| 926- | 1184 | | | | | | | | |
| 946 | | | | | | | | | |
| 926- | 1185 | | | | | | | | |
| 946 | | | | | | | | | |
| 926- | 1186 | | | | | | | | |
| 946 | | | | | | | | | |
| | | 1189 | 1188 | 1187 | Zea mays | CAB56631 | GRMZM2 | | |
| | | | | | | | G160917_ | | |
| | | | | | | | T01 | | |
| 589- | 1190 | | | | | | | | |
| 609 | | | | | | | | | |
| 589- | 1191 | | | | | | | | |
| 609 | | | | | | | | | |
| 589- | 1192 | | | | | | | | |
| 609 | | | | | | | | | |
| 589- | 1193 | | | | | | | | |
| 609 | | | | | | | | | |
| 589- | 1194 | | | | | | | | |
| 609 | | | | | | | | | |
| 589- | 1195 | | | | | | | | |
| 609 | | | | | | | | | |
| 589- | 1196 | | | | | | | | |
| 609 | | | | | | | | | |
| 589- | 1197 | | | | | | | | |
| 609 | | | | | | | | | |
| 589- | 1198 | | | | | | | | |
| 609 | | | | | | | | | |
| 589- | 1199 | | | | | | | | |
| 609 | | | | | | | | | |
| | | | | | | | | target: | |
| | | | | | | | | GRMZM2 | |
| | | | | | | | | G101511_ | |
| | | | | | | | | T01 of | |
| | | | | | | | | Mir zma- | |
| | | | | | | | | miR529 is | |
| | | | | | | | | located in | |
| | | | | | | | | UTR | |
| | | | | | | | target: | TAGCCA | zma- |
| | | | | | | | TC374958 | GGGAT | miR169l |
| | | | | | | | of Mir | GATTTG | |
| | | | | | | | zma- | CCTG/2 | |
| | | | | | | | miR169l | | |
| | | | | | | | is located | | |
| | | | | | | | in UTR | | |
| | | | | | | | | target: | |
| | | | | | | | | TC391807 | |
| | | | | | | | | of Mir | |
| | | | | | | | | zma- | |
| | | | | | | | | miR169l | |
| | | | | | | | | is located | |
| | | | | | | | | in UTR | |

TABLE 10
Target Mimic Examples for Selected up-regulated miRNAs of the
Invention

| | | Bulge | | |
|---|---|---|---|---|
| | Bulge in Target | Reverse | | |
| Full Target Mimic | Binding | Complement | MiR | |
| Nucleotide | Sequence/SEQ | miR/SEQ | sequence/SEQ | MiR |
| Seq/SEQ ID NO: | ID NO: | ID NO: | ID NO: | name |
| 1208 | GAGTTCCTCC | GAGTTCCC | GTGAAGT | zma- |
| | ACTAAGGCAC | CCACTAAA | GTTTGGG | miR395b |
| | TTCAT/1204 | CACTTCAC/1200 | GGAACTC/4 | |
| 11 | CTGCAGCAT | ATGCAGCA | GGAATCT | zma- |
| | CACTATCAG | TCACTATCA | TGATGAT | miR172e |
| | GATTCT/1205 | AGATTCC/1201 | GCTGCAT/3 | |
| 12 | CGAGTGTGC | AGGCTGTA | AGAAGA | zma- |
| | TCCTATCTCT | CTCCTATCT | GAGAGA | miR529 |
| | CTTCT/1206 | CTCTTCT/1202 | GTACAGCCT/1 | |
| 13 | GTGGCAACT | CAGGCAAA | TAGCCAG | zma- |
| | CACTATCCTT | TCACTATCC | GGATGAT | miR169l |
| | GGCTC/1207 | CTGGCTA/1203 | TTGCCTG/2 | |

TABLE 11
Target Mimic Examples for Selected up-regulated miRNAs of the
Invention

| | Bulge in | Bulge | | |
|---|---|---|---|---|
| | Target | Reverse | | |
| Full Target Mimic | Binding | Complement | MiR | MiR |
| Nucleotide Seq | Sequence | miR | sequence | name |
| 18 | TGTTAG | TGTTTGCTG | TTAGATG | zma- |
| | CTGATC | ATCTAGGT | ACCATCA | miR827 |
| | TAGGTC | CATCTAA/14 | GCAAACA/10 | |
| | ATATAC/16 | | | |
| 19 | TTCCCCC | ATCCCATTG | AGGATGC | Predicted |
| | TGCGCT | CGCTATCA | TGACGCA | zma |
| | ATCAGC | GCATCCT/15 | ATGGGAT/9 | mir |
| | TTCCT/17 | | | 48486 |

TABLE 12
Abbreviations of plant species

| | | Abbre- |
|---|---|---|
| Common Name | Organism Name | viation |
| Peanut | Arachis hypogaea | ahy |
| Arabidopsis lyrata | Arabidopsis lyrata | aly |
| Rocky Mountain Columbine | Aquilegia coerulea | aqc |
| Tausch's goatgrass | Aegilops taushii | ata |
| Arabidopsis thaliana | Arabidopsis thaliana | ath |
| Grass | Brachypodium distachyon | bdi |
| Brassica napus canola (“liftit”) | Brassica napus | bna |
| Brassica oleracea wild cabbage | Brassica oleracea | bol |
| Brassica rapa yellow mustard | Brassica rapa | bra |
| Clementine | Citrus Clementine | ccl |
| Orange | Citrus sinensis | csi |
| Trifoliate orange | Citrus trifoliata | ctr |
| Glycine max | Glycine max | gma |
| Wild soybean | Glycine soja | gso |
| Barley | Hordeum vulgare | hvu |
| Lotus japonicus | Lotus japonicus | lja |
| Medicago truncatula - Barrel | Medicago truncatula | mtr |
| Clover (“tiltan”) | | |
| Oryza sativa | Oryza sativa | osa |
| European spruce | Picea abies | pab |
| Physcomitrella patens (moss) | Physcomitrella patens | ppt |
| Pinus taeda - Loblolly Pine | Pinus taeda | pta |
| Populus trichocarpa - black | Populus trichocarpa | ptc |
| cotton wood | | |
| Castor bean (“kikayon”) | Ricinus communis | rco |
| Sorghum bicolor Dura | Sorghum bicolor | sbi |
| tomato microtom | Solanum lycopersicum | sly |
| Selaginella moellendorffii | Selaginella moellendorffii | smo |
| Sugarcane | Saccharum officinarum | sof |
| Sugarcane | Saccharum spp | ssp |
| Triticum aestivum | Triticum aestivum | tae |
| cacao tree and cocoa tree | Theobroma cacao | tcc |
| Vitis vinifera Grapes | Vitis vinifera | vvi |
| corn | Zea mays | zma |

[0307] Although the invention has been described in conjunction with specific embodiments thereof, it is evident that many alternatives, modifications and variations will be apparent to those skilled in the art. Accordingly, it is intended to embrace all such alternatives, modifications and variations that fall within the spirit and broad scope of the appended claims.

[0308] All publications, patents and patent applications mentioned in this specification are herein incorporated in their entirety by reference into the specification, to the same extent as if each individual publication, patent or patent application was specifically and individually indicated to be incorporated herein by reference. In addition, citation or identification of any reference in this application shall not be construed as an admission that such reference is available as prior art to the present invention. To the extent that section headings are used, they should not be construed as necessarily limiting.

1. A method of improving nitrogen use efficiency, abiotic stress tolerance, biomass, vigor or yield of a plant, the method comprising expressing within the plant an exogenous polynucleotide having a nucleic acid sequence at least 90% identical to SEQ ID NOs: 10, 6-9, 21, 22, 23-37, 38-52, 1209, 1211, 1212, wherein said nucleic acid sequence is capable of regulating nitrogen use efficiency of the plant, thereby improving nitrogen use efficiency, abiotic stress tolerance, biomass, vigor or yield of the plant.

2. A transgenic plant exogenously expressing a polynucleotide having a nucleic acid sequence at least 90% identical to SEQ ID NOs: 10, 6-9, 23-37, wherein said nucleic acid sequence is capable of regulating nitrogen use efficiency of the plant.

3. The method of claim 1, wherein said exogenous polynucleotide encodes a precursor of said nucleic acid sequence.

4. The method of claim 3, wherein said precursor of said nucleic acid sequence is at least 60% identical to SEQ ID NO: 21, 22, 38-52, 1209, 1211, 1212.

5. The method of claim 1, wherein said exogenous polynucleotide encodes a miRNA or a precursor thereof.

6. The method of claim 1, wherein said exogenous polynucleotide encodes a siRNA or a precursor thereof.

7. The method of claim 1, wherein said exogenous polynucleotide is selected from the group consisting of SEQ ID NO: 10, 6-9, 21, 22, 23-37, 38-52, 1209, 1211, 1212.

8-16. (canceled)

17. A method of improving nitrogen use efficiency, abiotic stress tolerance, biomass, vigor or yield of a plant, the method comprising expressing within the plant an exogenous polynucleotide which downregulates an activity or expression of a gene encoding an RNAi molecule having a nucleic acid sequence at least 90% identical to SEQ ID NOs: 4, 1-3,5,57-449, 454-846 and 53-56, 1209, thereby improving nitrogen use efficiency, abiotic stress tolerance, biomass, vigor or yield of a plant.

18-19. (canceled)

20. The method of claim 17, wherein said polynucleotide encodes a miRNA-Resistant Target as set forth in SEQ ID N01104-1124.

21. The method of claim 17, wherein said isolated polynucleotide encodes a target mimic as set forth in SEQ ID NO: 18 or 19.

22-26. (canceled)

27. The method of claim 1, further comprising growing the plant under abiotic stress.

28. The method of claim 27, wherein said abiotic stress is selected from the group consisting of salinity, drought, water deprivation, flood, etiolation, low temperature, high temperature, heavy metal toxicity, anaerobiosis, nutrient deficiency, nutrient excess, atmospheric pollution and UV irradiation.

29-30. (canceled)

31. A method of improving nitrogen use efficiency, abiotic stress tolerance, biomass, vigor or yield of a plant, the method comprising expressing within the plant an exogenous polynucleotide encoding a polypeptide having an amino acid sequence at least 80% homologous to SEQ ID NOs: 927-1021, wherein said polypeptide is capable of regulating nitrogen use efficiency of the plant, thereby improving nitrogen use efficiency, abiotic stress tolerance, biomass, vigor or yield of the plant.

32. A transgenic plant exogenously expressing a polynucleotide encoding a polypeptide having an amino acid sequence at least 80% homologous to SEQ ID NOs: 927-1021, wherein said polypeptide is capable of regulating nitrogen use efficiency of the plant.

33. (canceled)

34. The method of claim 31, wherein said polynucleotide is selected from the group consisting of SEQ ID NO: 1022-1090.

35. The method of claim 31, wherein said polypeptide is selected from the group consisting of SEQ ID NO: 927-1021.

36-38. (canceled)

39. The method of claim 31, further comprising growing the plant under limiting nitrogen conditions.

40. The method of claim 31, further comprising growing the plant under abiotic stress.

41. The method of claim 40, wherein said abiotic stress is selected from the group consisting of salinity, drought, water deprivation, flood, etiolation, low temperature, high temperature, heavy metal toxicity, anaerobiosis, nutrient deficiency, nutrient excess, atmospheric pollution and UV irradiation.

42. The method of claim 31, wherein the plant is a monocotyledon.

43. The method of claim 31, wherein the plant is a dicotyledon.

44. A method of improving nitrogen use efficiency, abiotic stress tolerance, biomass, vigor or yield of a plant, the method comprising expressing within the plant an exogenous polynucleotide which downregulates an activity or expression of a polypeptide having an amino acid sequence at least 80% homologous to SEQ ID NOs: 854-894, wherein said polypeptide is capable of regulating nitrogen use efficiency of the plant, thereby improving nitrogen use efficiency, abiotic stress tolerance, biomass, vigor or yield of the plant.

45-50. (canceled)

The application's sequence listing, which the Patent Office published only in electronic form, follows.

SEQUENCE LISTING (1212 sequences)

SEQ ID NO: 1 - DNA, 21 bp, Zea mays
agaagagagagagtacagcct

SEQ ID NO: 2 - DNA, 21 bp, Zea mays
tagccagggatgatttgcctg

SEQ ID NO: 3 - DNA, 21 bp, Zea mays
ggaatcttgatgatgctgcat

SEQ ID NO: 4 - DNA, 21 bp, Zea mays
gtgaagtgtttgggggaactc

SEQ ID NO: 5 - DNA, 21 bp, Zea mays
tagccaagcatgatttgcccg

SEQ ID NO: 6 - DNA, 22 bp, Zea mays
aggatgtgaggctattggggac

SEQ ID NO: 7 - DNA, 22 bp, Zea mays
ccaagtcgagggcagaccaggc

SEQ ID NO: 8 - DNA, 21 bp, Medicago truncatula
attcacggggacgaacctcct

SEQ ID NO: 9 - DNA, 21 bp, Zea mays
aggatgctgacgcaatgggat

SEQ ID NO: 10 - DNA, 21 bp, Zea mays
ttagatgaccatcagcaaaca

SEQ ID NO: 11 - DNA, 1329 bp, Artificial Sequence
  MiR target mimic nucleotide seqence
ggctgctggccgatatacgcaggtggattcgacaccgctcacgccgctgcaaggcacgcactggactggacgcccagaattcttcgtcatgtgagtctctgaccgaattgattgattaacgagtctctggctcctggaactcgcagggcgtacgaccgggcggcgatcaagttccgcggcgtcgacgccgacatcaacttcaacctcagcgactacgaggacgacatgaagcagatggggagcctgtccaaggaggagttcgtgcacgtcctgcgccgtcagagcaccggcttctcgagaggcagctccaggtacagaggcgtcaccctgcacaagtgcggccgctgggaggcgcgcatggggcagttcctcggcaagaagtacatataccttgggctattcgacagcgaagtagaggctgcaagagcctacgacaaggccgccatcaaatgcaatggcagagaggccgtgacgaacttcgagccgagcacgtatcacggggagctgccgactgaagttgctgatgtcgatctgaacctgagcatatctcagccgagcccccaaagagacaagaacagctgcctaggtctgcagctccaccacggaccattcgagggctccgaactgaagaaaaccaagatcgacgatgctccctctgagctaccgggccgccctcgtcagctgtctcctctcgtggctgagcatccgccggcctggcctgcgcagccgcctcaccccttcttcgtcttcacaaaccatgagatgagtgcatcaggagatctccacaggaggcctgcaggggctgttcccagctgggcatggcaggtggcagcagcagctcctcctcctgccgccctgccgtcgtccgctgcagcatcactatcaggattctccaacaccgccacgacagctgccaccaccgccccatcggcctcctccctccggtactgcccgccgccgccgccgccgtcgagccatcaccatccccgctgagagaatcaagaagccgcactgtaaatctgccgggaagctagcattttccccccggcccctccccctctccgggcgttgcgactttttcagttttgcgccgccggccggggtggtggtttcttgtagccgatcgattggattcctcgtattactgctgcttacactcccaattaagtgaaaaaaaaacgctcctctactctttacactacacacactgttagctgatcgattggacgtacttgctagctgctgttgctgctgctagcttgagattgactaacttcagcacttggattgatctatatctatatgactatatagacgacacattgtgta

SEQ ID NO: 12 - DNA, 1345 bp, Artificial Sequence
  MiR target mimic nucleotide seqence
cacacacgcgagcacgcgcccgcactgttcgctcgctccccatctccacacccgccgctctccacagtgctgctatcgagacgtctttctccgattgcggaggcgtttctttccttcttcgccggcggcggcatggactgggcagcggcgtccgggtctccgtcgtggggcgcggcggcgacggaccccggtccgaccatgctgtccttcgcaggcccgtcctcctccgccgccgacgccgaggtgcggctccaggatttcgccgcgggtcttgcccagagctcgcggccgactggggcggcgccgggagccgggaggaggtcccgcgcggccgtgggaggtgccggcgcggaggcgtgctccgtcgacggctgccgctctgatctcagccggtgccgcgagtaccaccggcggcataaggtctgtgaggcacactccaaggcgccggtggtggtcgtcggcggacaggagcggcgcttctgccagcaatgcagccggtttcacatgctgtccgagtttgacgaggaaaaaagaagttgccggaagcgtctggatggccataataggcgtcgaagaaagccacagcatgatctgacaaatctagggggtttctttccataccaccaagtgaatcagtttgagttctacccacaaacaattccaacagttggccagaattcggacgccgtgcacttggtgggccgtcagcagcctttctccatatcgttctcaagaacaccagacgagttccctttcccacagggtggcggtagcagtgtgctgcaccacctccatgcagcccgccctggccatcacgctgaaggcagcagccacactggaagcagcacacgcgacaacgctctttccggcacactgggccccgagtgtgctcctatctctcttctgtcatcgtcgctgcgtcgcccctcaactgctggcgtccccgccgttggccaaccccaggttactgcctcttcgaccactgccgtgtcgcaggctgcaacggcagctgtggccactgctgcattcgcggccagtgctggcccccatgtgtttgttcctgatgctatgtttgaggatccatcacaggcactgccattctcttggcagtaggattgttttgttgtcctgtttttatgtgctcctgttgtgttctcgatcgatactctagtgtctgatggctgggaattcggggtacctgtgcacttgcagactcaggttgtggtccgtcagagatgtatacaagtgacacgacgactagtgctggcatctgaaaggaagtggtagctgctgtgcagagtgtttagccgttaaattcaaatgcgcccgttcaatttttttcttc

SEQ ID NO: 13 - DNA, 1401 bp, Artificial Sequence
  MiR target mimic nucleotide seqence
gttcgacgtatttctctctctatctatacgattccgaagaaggtagagagagaaactcgaaggggagaggacagaagagggagatacaggttaatttttaggtaccagatcatctgatttctcagaagcaaaatgttgtttggagctcagtgacaccatcttgtaatgcctgtgattttacgggaaatggaggatcattctgtccatcccatgtctaagtctaaccatggctccttgtcaggaaatggttatgagatgaaacattcaggccataaagtttgcgatagggattcatcatcggagtctgatcggtctcaccaagaagcatcagcagcaagtgaaagcagtccaaatgaacacacatcaactcaatcagacaatgatgaagatcatgggaaagataatcaggacacaatgaagccagtattgtccttggggaaggaaggctctgcctttttggccccaaaattacattacagcccatcttttgcttgtattccttatacttctgatgcttattatagtgcggttggggtcttgacaggatatcctccacatgccattgtccatccccagcaaaatgatacaacgaacactccgggtatgttacctgtggaacctgcagaagaaccaatatatgttaatgcaaaacaataccatgcaatccttaggaggaggcaaacacgtgctaaattggaggcccagaacaagatggtgaaaaatcggaagccatatcttcatgagtcccgacatcgtcatgccatgaaacgggctcgtggatcaggaggacggttcctcaacacaaagcagctccaggagcagaaccagcagtatcaggcatcgagtggttcattgtgctcaaagatcattgccaacagcataatctcccaaagtggccccacctgcacgccctcttctggcactgcaggtgcttcaacagccggccaggaccgcagctgcttgccctcagttggcttccgccccacgacaaacttcagtgaccaaggtcgaggaggcttgaagctggccgtgatcggcatgcagcagcgtgtttccaccataaggtgaagagaagtgggcacaacaccattcccaggcacactgcctgtggcaactcactatccttggctcttggaactttgaatatgcaatcgacatgtagcttgagatcctcagaataaaccaaaccttcagttatatgcaagccttttttgaggttgctgttgctgtacctgagaactgtggttaggttatgagtttgttcctcaaaactgacccatacatgacatgctaccttgtgctgagtttttgagacaaagccatcgaaacatgatcttgtggttcagtactttgctgccattagtgtctgataaactagctccccagtttgcagtttttttg

SEQ ID NO: 14 - DNA, 24 bp, Artificial Sequence
  Bulge Reverse Complement miR
tgtttgctgatctaggtcatctaa

SEQ ID NO: 15 - DNA, 24 bp, Artificial Sequence
  Bulge Reverse Complement miR
atcccattgcgctatcagcatcct

SEQ ID NO: 16 - DNA, 24 bp, Artificial Sequence
  Bulge in Target Binding Sequence
tgttagctgatctaggtcatatac

SEQ ID NO: 17 - DNA, 24 bp, Artificial Sequence
  Bulge in Target Binding Sequence
ttccccctgcgctatcagcttcct

SEQ ID NO: 18 - DNA, 2432 bp, Artificial Sequence
  MiR target mimic nucleotide seqence
acacgcataagcaaaaaaatgttttcattacaacatgtacccctgcactaggaaaataaggcactcggcactcgtgagccgtcgcatttccccccgtgtgaccaattcctctaagggccgagcagccgttccaatccgctcacgccgcctctctcgctgccccgcttgaccgcctgctagccgctaaaattgatgctgatgacctgatccctccgttgggtaggttcttgggcgcggaaagaacaaagaactcgtggtgggtccgggtccgcaagaccctaggtgttcgtcagcagcgaggatgcccggcctgcctctgcctcaatcgttaaatcagaatattggatgtgaatatgcctatcctgggtctacaggccaggccttccgtcagcagctaagaactgcattgtctccagatgagaaacttaccgctgaaaaagatttggctctgtattgcaagccagtcgagctctacaatattattcaacggcgagccatgaaaaatcccctttttattcaaagatgccttctttataatatacatgcgaggaggaaaaagaggattcagataaccatatcactttctggaagtacaaatactgagttgcaaacacattatgtctttcctctttatgttctgttagctagacccactagtaacctttcacttgaagggcattctccaatttatcgattcagtcgggtttgcttgcttacttcctttagtgaacatggaaataaggacaacagtgaagctacattcatcattcctgacgtgaagagtttgtcaacctcccgtgcttgcaaccatgatattatctttatcagctgtgggcaagttgggcaaagtaatggtgaagataactgctctgggaaccatgtggaagcttcttctctccaaatgcttgaagggaaatgctcctggggtaaaataccaactaatttacttgcttcatctttggagagttgtgtcaatttaagtttgggacatattgtggagttggcatctaaagttacaatgagatcaagcttcttagagccaaaatttctggagcaagacaattgcttgacattttgctctcataaggttgatgctgtgggttcatataaactacaactatgcatgtccgcacaagaggctggtgcaagagatatgtctttgtctccacatagtagttactcatataatgatgtcccaccctcgtcattatcagatatcataaggttaagatctggcaatgtactttttaattacaagtactacagtaatacaatgcaagagactgaagtcactgaagatttctcttgtccattttgctatgtacgatgtggaagcttcaagggtctaggatgccatttaaactcgtcacatgatctattccactatgagttttggatatccgaagagtaccaggttgttaatgttagtctgaaggctgatgcttggagaacagagctttttgcggagggcgttgatccaaggcatcaaacattttcttatcgctcaaggtttaagaagcgtagacgatcaaagacaacaatggagaaaatcaggcatgtacactcacatattatggagtcaggttcacctggagacgaggcaggatctgaggacaactttgtgcaaggggagaatgggacttctgtagcaaatgcttcgattgatcctgctcaatctttacatggcagcaatctttcaccaccaacagtactacagtttgggaagacaaggaagctatctgagagatctgaccctagaaatcggcaactcctgcaaaaacgacagttcttccattctcacagggcgcagccaatgcaactggagcaagtgttctcggaccgtgatagtgaagatgaagttgatgatgatattgctgacttcgaggatagaagaatgcttgatgattttgttgatgttacgaaagatgaaaaacttattatgcatatgtggaattcatttgttcgaaaacaaagagtgttagctgatctaggtcatataccttgggcctgcgaggcattctcccagttgcatggacgacaacttatacaaaatcctgctctgctgtggggttggcgtttcttcatgattaaactttggaaccataacattttagatgcccgcactatgaacacatgcaatacagtccttcaaattttacaagaagaaagcacaggactaaagtaattttgatgcttctgatgaaaattcaagggaagaagatttctttaccatttccaagaagaaagcatagaattggagtaactttttattgataatttcattcatatctattgtcaattgtattaatggtttttaaaagagacaaatcatgtctaactctcacgctgtaatattctaagtcgtacgtgaatttgatgaatattcattgttgttttacttaagagttatcgtattgagatcctaacaaaag

SEQ ID NO: 19 - DNA, 1310 bp, Artificial Sequence
  MiR target mimic nucleotide seqence
ccagctttatcttcagccgcgcgcagccgctcttttctaccccagcgccgcgcgcatgcccctgtcgcgcagctcctggctcgcccctgcgatcgccatggcgattccccctgcgctatcagcttcctcggcgttcatcaccctgctcccctcgccggcgccgagttcctgccccatcttcctcgccgagcttctctgctgcgcgctggtttctcccccatggcgcatcactgctcggttccatggccagccgaagctccctgacgttcgtcctgaccgccgcgccttctctctctgcttgctgctcgccggtgccctgtcccagtgtcgcggcgccctgctcattcttcctggcgctcggccttgaagctcccttggctgcctgcgtcgcgcccagttctcctccctttcccatggctgctctctctccttcctctccctcctctgcgcagcgccgcatctctctgctggtcacggcacgtcgagcccccagcgctgcggccctttccccagcttctttctccctgcggcagctcgccctcgcttgtgccgcgcccctgcgctcgtcgcggcgctccagctcgcccatctgcgcgcagccacgaactcccctgcgctctgctcgcagcgccgcagttctttctcccggctccctctgtccgttctcgaccgcgccttgctccctggacgcgcacgcagcgttccgtcgtccctcgccatgccgagttctctgcgcgcagtcgcgtcccactgcttggctatggccaccatcgtgcctaggatttgtgcatccttctctgttcagcctcggcaaaaaaaaactctggatgcttggaccccgcctcgaccaagtctttccgttttggccgtcataggttgtcgtcgttcatcatcgcgtcgtgcagcagcgcgtcccttatcgtgcccatgcttaatactgccattcctgctgtgcctcgcttccgttgtgttcgattaaatgttggaccaagattccacgatgtcactcatcctcgttgtgaaaccctcacgctcatcatcccctgttcgatctcgtcgtcgagcttcgcctcagacttagctcgtcggtcacgctcgccagatgttcgatcaaggacttcagctgaaggccgtcgttgttcaggcaactaccaaatcgaattgtgatgtggtgagccgattcgctatttttactatcggttttatgatcgtaaaataagacgcttcgtatgcgtatacgattaagttagaaataccagtgatgcgaggtgtgcgcttggtaattatggctagatccgttgttatggtgt

SEQ ID NO: 20 - DNA, 20 bp, Artificial Sequence
  Single strand DNA oligonucleotide
tttagcgatgaacttcactc

SEQ ID NO: 21 - DNA, 194 bp, Medicago truncatula
aattcacggggacgaacctccttcgttgaaagtttgctttattcttttgatatatctatccatgatacaaggaagtaatgcatttaagttcaatcaagcttggccttcatcagaatttccgttgacgggactccacaggaggtacaacctttaagttgatactgagggatggagggagggttgcccctgttgaa

SEQ ID NO: 22 - DNA, 122 bp, Zea mays
gttttgttggtggtcatttaaccatgcatgcttcgatcgatggattggtgcatgcatggattattgcatagtgtgatgcatgtggcgcatcagtgcatggttagatgaccatcagcaaacat

SEQ ID NO: 23 - DNA, 21 bp, Medicago truncatula
attcacggggacgaacctcct

SEQ ID NO: 24 - DNA, 21 bp, Medicago truncatula
attcacggggacgaacctcct

SEQ ID NO: 25 - DNA, 21 bp, Arabidopsis lyrata
ttagatgaccatcaacaaacg

SEQ ID NO: 26 - DNA, 21 bp, Arabidopsis thaliana
ttagatgaccatcaacaaact

SEQ ID NO: 27 - DNA, 21 bp, Brachypodium distachyon
ttagatgaccatcagcaaaca

SEQ ID NO: 28 - DNA, 21 bp, Citrus sinensis
ttagatgaccatcaacaaaca

SEQ ID NO: 29 - DNA, 21 bp, Gossypium hirsutum
ttagatgaccatcaacaaaca

SEQ ID NO: 30 - DNA, 21 bp, Gossypium hirsutum
ttagatgaccatcaacaaaca

SEQ ID NO: 31 - DNA, 21 bp, Gossypium hirsutum
ttagatgaccatcaacaaaca

SEQ ID NO: 32 - DNA, 21 bp, Oryza sativa
taagatgaccatcagcgaaaa

SEQ ID NO: 33 - DNA, 21 bp, Oryza sativa
ttagatgaccatcagcaaaca

SEQ ID NO: 34 - DNA, 21 bp, Oryza sativa
ttagatgaccatcagcaaaca

SEQ ID NO: 35 - DNA, 21 bp, Populus trichocarpa
ttagatgaccatcaacgaaaa

SEQ ID NO: 36 - DNA, 21 bp, Saccharum ssp.
ttagatgaccatcagcaaaca

SEQ ID NO: 37 - DNA, 21 bp, Theobroma cacao
ttagatgaccatcaacaaaca

SEQ ID NO: 38 - DNA, 194 bp, Medicago truncatula; identical to SEQ ID NO: 21

SEQ ID NO: 39 - DNA, 194 bp, Medicago truncatula; identical to SEQ ID NO: 21

SEQ ID NO: 40 - DNA, 197 bp, Arabidopsis lyrata
tacatctttaacttccatgaaacattatagggttttttctctcttgcaacccttgaatgtgtttgttgattgacatctatacatatcgataatcctatcgtgttgatagatcgattggtttagatgaccatcaacaaacgctttcgtggttttgcatcgcttcttgaaatcttgatcatgtttttagcatctttgta

SEQ ID NO: 41 - DNA, 177 bp, Arabidopsis thaliana
ttccatgaaacgttataggtttttttctttctctcttgcaacccttgaatgtgtttgttgattgatatctacacatgttgatcatccttgtgttgatcgattggtttagatgaccatcaacaaactctttcgtggttttgcatcgcttcttggaatctcgatcatgtttttagcatc

SEQ ID NO: 42 - DNA, 164 bp, Brachypodium distachyon
attgagccgattcatgcagctctgaacttgttttgttggttgtcatctaaccatcgatcggtccgtgcttcggtgcttgtgccatgattttgcatcatcacaccggcgatggttagatgaccatcagcaaacatgttcgtgagacatgccgtgcgtcctgagct

SEQ ID NO: 43 - DNA, 100 bp, Citrus sinensis
gcttgttgattgtcatctaatcattttctttttcatccgggcatttgaatgattatatggttagatgaccatcaacaaacatattcatggtatggcatgc

SEQ ID NO: 44 - DNA, 155 bp, Gossypium hirsutum
atgcattgttgaatgtgtttgtttatggtcatctaagccatttttcatctcgccaattctttgttcaagcagtttttggataatcgaaccgatagactacacccgcagaaatgatgtttagatgaccatcaacaaacaacttcatcttattgcat

SEQ ID NO: 45 - DNA, 192 bp, Gossypium hirsutum
ctttttcttttcatgaaaatgcattattgaatgtgtttgtttatggtcatctaagccatttttcatctcgccaattctttgttcaagcagtttttggataatcgaaccgatagaatacacccgcagaaatgatgtttagatgaccatcaacaaacaacttcatcttattgcatcaagtgttcaagatttaag

SEQ ID NO: 46 - DNA, 155 bp, Gossypium hirsutum
atgcattgttgaatgtgtttgtttatggtcatctaagccatttttcatctcgccaattctttgttcaagcagtttttggataatcgaaccgatagactacacccgcagaaatgatgtttagatgaccatcaacaaacaacttcctcttattgcat

SEQ ID NO: 47 - DNA, 132 bp, Oryza sativa
gattttcgctgacggccgatttaacacagccaccagcgaaaatgaatttttgctagcggctgatgtaagatgaccgctagcaaagatccatttttgctggtggctggcttaagatgaccatcagcgaaaatg

SEQ ID NO: 48 - DNA, 117 bp, Oryza sativa
ttttgttgctggtcatctagctacccgtgcatgcctggagattggagaataattgacgatgcagcagtcggcttattggctcttgggcacgcgtggttagatgaccatcagcaaaca

SEQ ID NO: 49 - DNA, 138 bp, Oryza sativa
ccatgaacctgttttgttgctggtcatctagctacccgtgcatgcctggagattggagaataattgacgatgcagcagtcggcttattggctcttgggcacgcgtggttagatgaccatcagcaaacaagttcgtgag

SEQ ID NO: 50 - DNA, 76 bp, Populus trichocarpa
catgaatatatttgttgatagtcatctagtgaacattgaaagtcatattagatgaccatcaacgaaaacattcatg

SEQ ID NO: 51 - DNA, 130 bp, Saccharum ssp.
acctgttttgttggtggtcatttaaccatgcttccatcgatgggtgcatggtttatggcagagtgtgatgccatgaactcatcatggtcatgcatgtgtgcatggttagatgaccatcagcaaacatgtt

SEQ ID NO: 52 - DNA, 148 bp, Theobroma cacao
aaattatgcattattgaatatgtttgttgatggtcatcttgtcattttttcacctcttcttggccttgtaccagttgccagtaccaagttcgtgtgcagaatgatgcttagatgaccatcaacaaacactttcatcgttttgcattct

SEQ ID NO: 53 - DNA, 89 bp, Zea mays
gtagccagggatgatttgcctgtggttcctgtcgttgccatgccaatgcctgtactgttcgatctacgggcaaatcatccctgctaccg

SEQ ID NO: 54 - DNA, 174 bp, Zea mays
cagccagccggtgatttctggagtggcatcatcaagattcacacactgcatgccaacataatgcgcgtgttcatgcatccatcgccgccgctgcatcatgcatcatatataatatatatatatgtgtatgtgtgggaatcttgatgatgctgcattggatatcaagggctatat

SEQ ID NO: 55 - DNA, 114 bp, Zea mays
gcaacgttttgtgttactaggagttccctacaagcacttcacaataccttggctcaataaattaaaggccagttgtgaagtgtttgggggaactcttggtatcatgaagcattt

SEQ ID NO: 56 - DNA, 126 bp, Zea mays
gagaagagagagagtacagccttgttgccatgtacacactcagatatcaacagtctcttatatttgctgttactacctgttattagtgtccagtgatgatgaaggctgtaccctctctcttcttct

SEQ ID NO: 57 - DNA, 21 bp, Arabidopsis lyrata
cagccaaggatgacttgccgg

SEQ ID NO: 58 - DNA, 21 bp, Arabidopsis lyrata
cagccaaggatgacttgccgg

SEQ ID NO: 59 - DNA, 21 bp, Arabidopsis lyrata
tagccaaggatgacttgcctg

SEQ ID NO: 60 - DNA, 21 bp, Arabidopsis lyrata
tagccaaggatgacttgcctg

SEQ ID NO: 61 - DNA, 21 bp, Arabidopsis lyrata
tagccaaggatgacttgcctg

SEQ ID NO: 62 - DNA, 21 bp, Arabidopsis lyrata
tagccaaggatgacttgcctg

SEQ ID NO: 63 - DNA, 21 bp, Arabidopsis lyrata
tagccaaggatgacttgcctg

SEQ ID NO: 64 - DNA, 21 bp, Arabidopsis lyrata
tagccaaggatgacttgcctg

SEQ ID NO: 65 - DNA, 21 bp, Arabidopsis lyrata
tagccaaagatgacttgcctg

SEQ ID NO: 66 - DNA, 21 bp, Aquilegia caerulea
tagccaaggatgacttgccta

SEQ ID NO: 67 - DNA, 21 bp, Aquilegia caerulea
tagccaaggatgacttgcctg

SEQ ID NO: 68 - DNA, 21 bp, Aquilegia caerulea
cagccaaggatgacttgccgg

SEQ ID NO: 69 - DNA, 21 bp, Aegilops tauschii
tagccaaggatgaattgccag

SEQ ID NO: 70 - DNA, 21 bp, Arabidopsis thaliana
cagccaaggatgacttgccgg

SEQ ID NO: 71 - DNA, 21 bp, Arabidopsis thaliana
cagccaaggatgacttgccgg

SEQ ID NO: 72 - DNA, 21 bp, Arabidopsis thaliana
tagccaaggatgacttgcctg

SEQ ID NO: 73 - DNA, 21 bp, Arabidopsis thaliana
tagccaaggatgacttgcctg

SEQ ID NO: 74 - DNA, 21 bp, Arabidopsis thaliana
tagccaaggatgacttgcctg

SEQ ID NO: 75 - DNA, 21 bp, Arabidopsis thaliana
tagccaaggatgacttgcctg

SEQ ID NO: 76 - DNA, 21 bp, Arabidopsis thaliana
tagccaaggatgacttgcctg

SEQ ID NO: 77 - DNA, 21 bp, Arabidopsis thaliana
tagccaaggatgacttgcctg

SEQ ID NO: 78 - DNA, 21 bp, Arabidopsis thaliana
tagccaaggatgacttgcctg

SEQ ID NO: 79 - DNA, 21 bp, Brachypodium distachyon
tagccaaggatgacttgccgg

SEQ ID NO: 80 - DNA, 21 bp, Brachypodium distachyon
cagccaaggatgacttgccgg

SEQ ID NO: 81 - DNA, 21 bp, Brachypodium distachyon
tagccaagaatgacttgccta

SEQ ID NO: 82 - DNA, 21 bp, Brachypodium distachyon
tagccaaggatgacttgcctg

SEQ ID NO: 83 - DNA, 21 bp, Brachypodium distachyon
cagccaaggatgacttgccgg

SEQ ID NO: 84 - DNA, 21 bp, Brachypodium distachyon
tagccaaggatgacttgcctg

SEQ ID NO: 85 - DNA, 21 bp, Brachypodium distachyon
tagccaaggatgacttgccta

SEQ ID NO: 86 - DNA, 21 bp, Brachypodium distachyon
tagccaggaatggcttgccta

SEQ ID NO: 87 - DNA, 22 bp, Brachypodium distachyon
tagccaaggatgatttgcctgt

SEQ ID NO: 88 - DNA, 21 bp, Brassica napus
tagccaaggatgacttgccta

SEQ ID NO: 89 - DNA, 21 bp, Brassica napus
tagccaaggatgacttgccta

SEQ ID NO: 90 - DNA, 21 bp, Brassica napus
tagccaaggatgacttgccta

SEQ ID NO: 91 - DNA, 21 bp, Brassica napus
tagccaaggatgacttgccta

SEQ ID NO: 92 - DNA, 22 bp, Brassica napus
tagccaaggatgacttgcctgc

SEQ ID NO: 93 - DNA, 22 bp, Brassica napus
tagccaaggatgacttgcctgc

SEQ ID NO: 94 - DNA, 22 bp, Brassica napus
tagccaaggatgacttgcctgc

SEQ ID NO: 95 - DNA, 22 bp, Brassica napus
tagccaaggatgacttgcctgc

SEQ ID NO: 96 - DNA, 22 bp, Brassica napus
tagccaaggatgacttgcctgc

SEQ ID NO: 97 - DNA, 22 bp, Brassica napus
tagccaaggatgacttgcctgc

SEQ ID NO: 98 - DNA, 21 bp, Festuca arundinacea
tagccaaggatgacttgccta

SEQ ID NO: 99 - DNA, 21 bp, Gossypium herbacium
tagccaaggatgacttgcctg

SEQ ID NO: 100 - DNA, 21 bp, Glycine max
cagccaaggatgacttgccgg

SEQ ID NO: 101 - DNA, 23 bp, Glycine max
tgagccaaggatgacttgccggt

SEQ ID NO: 102 - DNA, 20 bp, Glycine max
agccaaggatgacttgccgg

SEQ ID NO: 103 - DNA, 21 bp, Hordeum vulgare
aagccaaggatgagttgcctg

SEQ ID NO: 104 - DNA, 21 bp, Medicago truncatula
cagccaagggtgatttgccgg

SEQ ID NO: 105 - DNA, 21 bp, Medicago truncatula
aagccaaggatgacttgccgg

SEQ ID NO: 106 - DNA, 21 bp, Medicago truncatula
aagccaaggatgacttgccta

SEQ ID NO: 107 - DNA, 21 bp, Medicago truncatula
cagccaaggatgacttgccgg

SEQ ID NO: 108 - DNA, 21 bp, Medicago truncatula
cagccaaggatgacttgccgg

SEQ ID NO: 109 - DNA, 21 bp, Medicago truncatula
cagccaagggtgatttgccgg

SEQ ID NO: 110 - DNA, 21 bp, Medicago truncatula
aagccaaggatgacttgccgg

SEQ ID NO: 111 - DNA, 21 bp, Medicago truncatula
gagccaaggatgacttgccgg

SEQ ID NO: 112 - DNA, 21 bp, Oryza sativa
cagccaaggatgacttgccgg

SEQ ID NO: 113 - DNA, 21 bp, Oryza sativa
cagccaaggatgacttgccgg

SEQ ID NO: 114 - DNA, 21 bp, Oryza sativa
tagccaaggatgaattgccgg

SEQ ID NO: 115 - DNA, 21 bp, Oryza sativa
tagccaaggatgacttgccgg

SEQ ID NO: 116 - DNA, 21 bp, Oryza sativa
tagccaaggatgacttgccta

SEQ ID NO: 117 - DNA, 21 bp, Oryza sativa
tagccaaggatgacttgccta

SEQ ID NO: 118 - DNA, 21 bp, Oryza sativa
tagccaaggatgacttgcctg

SEQ ID NO: 119 - DNA, 21 bp, Oryza sativa
tagccaaggatgacttgcctg

SEQ ID NO: 120 - DNA, 21 bp, Oryza sativa
tagccaaggatgacttgcctg

SEQ ID NO: 121 - DNA, 21 bp, Oryza sativa
tagccaaggatgacttgcctg

SEQ ID NO: 122 - DNA, 21 bp, Oryza sativa
tagccaaggatgacttgcctg

SEQ ID NO: 123 - DNA, 21 bp, Oryza sativa
tagccaaggatgacttgcctg

SEQ ID NO: 124 - DNA, 21 bp, Oryza sativa
tagccaagaatgacttgccta

SEQ ID NO: 125 - DNA, 21 bp, Oryza sativa
tagccaagaatgacttgccta

SEQ ID NO: 126 - DNA, 21 bp, Populus trichocarpa
cagccaaggatgacttgccgg

SEQ ID NO: 127 - DNA, 21 bp, Populus trichocarpa
cagccaaggatgacttgccgg

SEQ ID NO: 128 - DNA, 21 bp, Populus trichocarpa
cagccaaggatgacttgccgg

SEQ ID NO: 129 - DNA, 21 bp, Populus trichocarpa
cagccaaggatgacttgccgg

SEQ ID NO: 130 - DNA, 21 bp, Populus trichocarpa
cagccaaggatgacttgccgg

SEQ ID NO: 131 - DNA, 21 bp, Populus trichocarpa
tagccaaggatgacttgcctg

SEQ ID NO: 132 - DNA, 21 bp, Populus trichocarpa
tagccaaggatgacttgcctg

SEQ ID NO: 133 - DNA, 21 bp, Populus trichocarpa
tagccaaggatgacttgcctg

SEQ ID NO: 134 - DNA, 21 bp, Populus trichocarpa
tagccaaggatgacttgcctg

SEQ ID NO: 135 - DNA, 21 bp, Populus trichocarpa
tagccaaggatgacttgcctg

SEQ ID NO: 136 - DNA, 21 bp, Populus trichocarpa
aagccaaggatgacttgcctg

SEQ ID NO: 137 - DNA, 21 bp, Populus trichocarpa
aagccaaggatgacttgcctg

SEQ ID NO: 138 - DNA, 21 bp, Populus trichocarpa
tagccaaggacgacttgcctg

SEQ ID NO: 139 - DNA, 21 bp, Populus trichocarpa
tagccaaggatgacttgccta

SEQ ID NO: 140 - DNA, 21 bp, Populus trichocarpa
tagccaaggacgacttgccta

SEQ ID NO: 141 - DNA, 21 bp, Populus trichocarpa
tagccaaggatgacttgccca

SEQ ID NO: 142 - DNA, 21 bp, Populus trichocarpa
tagccaaggatgacttgccca

SEQ ID NO: 143 - DNA, 21 bp, Populus trichocarpa
tagccaaggatgacttgctcg

SEQ ID NO: 144 - DNA, 21 bp, Populus trichocarpa
tagccatggatgaattgcctg

SEQ ID NO: 145 - DNA, 21 bp, Populus trichocarpa
cagccaagaatgatttgccgg

SEQ ID NO: 146 - DNA, 21 bp, Ricinus communis
cagccaaggatgacttgccgg

SEQ ID NO: 147 - DNA, 21 bp, Ricinus communis
cagccaaggatgacttgccgg

SEQ ID NO: 148 - DNA, 21 bp, Sorghum bicolor
cagccaaggatgacttgccgg

SEQ ID NO: 149 - DNA, 21 bp, Sorghum bicolor
tagccaaggatgacttgccta

SEQ ID NO: 150 - DNA, 21 bp, Sorghum bicolor
tagccaaggatgacttgccta

SEQ ID NO: 151 - DNA, 21 bp, Sorghum bicolor
tagccaaggatgacttgccgg

SEQ ID NO: 152 - DNA, 21 bp, Sorghum bicolor
tagccaaggatgacttgcctg

SEQ ID NO: 153 - DNA, 21 bp, Sorghum bicolor
tagccaaggatgacttgcctg

SEQ ID NO: 154 - DNA, 21 bp, Sorghum bicolor
tagccaaggatgacttgccta

SEQ ID NO: 155 - DNA, 21 bp, Sorghum bicolor
tagccaagaatgacttgccta

SEQ ID NO: 156 - DNA, 21 bp, Sorghum bicolor
tagccaaggatgacttgccgg

SEQ ID NO: 157 - DNA, 21 bp, Sorghum bicolor
cagccaaggatgacttgccgg

SEQ ID NO: 158 - DNA, 21 bp, Sorghum bicolor
tagccaaggatgacttgcctg

SEQ ID NO: 159 - DNA, 21 bp, Sorghum bicolor
tagccaaggatgacttgccta

SEQ ID NO: 160 - DNA, 21 bp, Sorghum bicolor
tagccaaggatgacttgccta

SEQ ID NO: 161 - DNA, 21 bp, Sorghum bicolor
tagccaaggatgatttgcctg

SEQ ID NO: 162 - DNA, 21 bp, Solanum lycopersicum
cagccaaggatgacttgccgg

SEQ ID NO: 163 - DNA, 21 bp, Solanum lycopersicum
tagccaaggatgacttgcctg

SEQ ID NO: 164 - DNA, 21 bp, Solanum lycopersicum
tagccaaggatgacttgccta

SEQ ID NO: 165 - DNA, 21 bp, Saccharum ssp.
tagccaaggatgacttgccgg

SEQ ID NO: 166 - DNA, 21 bp, Theobroma cacao
cagccaaggatgacttgccgg

SEQ ID NO: 167 - DNA, 21 bp, Theobroma cacao
tagccaaggatgacttgccta

SEQ ID NO: 168 - DNA, 21 bp, Theobroma cacao
aagccaagaatgacttgcctg

SEQ ID NO: 169 - DNA, 21 bp, Theobroma cacao
tagccagggatgacttgccta

SEQ ID NO: 170 - DNA, 21 bp, Theobroma cacao
tagccaaggatgacttgcctg

SEQ ID NO: 171 - DNA, 21 bp, Theobroma cacao
tagccaaggatgagttgcctg

SEQ ID NO: 172 - DNA, 21 bp, Theobroma cacao
tagccaaggatgacttgcctg

SEQ ID NO: 173 - DNA, 21 bp, Theobroma cacao
cagccaaggatgacttgccgg

SEQ ID NO: 174 - DNA, 21 bp, Theobroma cacao
cagccaaggatgacttgccgg

SEQ ID NO: 175 - DNA, 21 bp, Vitis vinifera
cagccaaggatgacttgccgg

SEQ ID NO: 176 - DNA, 21 bp, Vitis vinifera
cagccaaggatgacttgccgg

SEQ ID NO: 177 - DNA, 21 bp, Vitis vinifera
cagccaagaatgatttgccgg

SEQ ID NO: 178 - DNA, 22 bp, Vitis vinifera
tagccaaggatgacttgcctgc

SEQ ID NO: 179 - DNA, 21 bp, Vitis vinifera
cagccaaggatgacttgccgg

SEQ ID NO: 180 - DNA, 21 bp, Vitis vinifera
cagccaaggatgacttgccgg

SEQ ID NO: 181 - DNA, 21 bp, Vitis vinifera
gagccaaggatgacttgccgg

SEQ ID NO: 182 - DNA, 21 bp, Vitis vinifera
gagccaaggatgacttgccgg

SEQ ID NO: 183 - DNA, 21 bp, Vitis vinifera
gagccaaggatgacttgccgg

SEQ ID NO: 184 - DNA, 21 bp, Vitis vinifera
gagccaaggatgacttgccgg

SEQ ID NO: 185 - DNA, 21 bp, Vitis vinifera
cagccaaggatgacttgccgg

SEQ ID NO: 186 - DNA, 21 bp, Vitis vinifera
aagccaaggatgaattgccgg

SEQ ID NO: 187 - DNA, 21 bp, Vitis vinifera
cagccaaggatgacttgccgg

SEQ ID NO: 188 - DNA, 21 bp, Vitis vinifera
tagccaaggatgacttgccta

SEQ ID NO: 189 - DNA, 21 bp, Vitis vinifera
tagcgaaggatgacttgccta

SEQ ID NO: 190 - DNA, 21 bp, Zea mays
cagccaaggatgacttgccgg

SEQ ID NO: 191 - DNA, 21 bp, Zea mays
tagccaaggatgacttgccta

SEQ ID NO: 192 - DNA, 21 bp, Zea mays
tagccaaggatgacttgccta

SEQ ID NO: 193 - DNA, 21 bp, Zea mays
tagccaaggatgacttgccta

SEQ ID NO: 194 - DNA, 21 bp, Zea mays
tagccaaggatgacttgcctg

SEQ ID NO: 195 - DNA, 21 bp, Zea mays
tagccaaggatgacttgcctg

SEQ ID NO: 196 - DNA, 21 bp, Zea mays
tagccaaggatgacttgcctg

SEQ ID NO: 197 - DNA, 21 bp, Zea mays
tagccaagaatgacttgccta

SEQ ID NO: 198 - DNA, 21 bp, Zea mays
tagccaaggatgacttgccgg

SEQ ID NO: 199 - DNA, 21 bp, Zea mays
cagccaaggatgacttgccgg

SEQ ID NO: 200 - DNA, 21 bp, Arabidopsis lyrata
agaatcttgatgatgctgcat

SEQ ID NO: 201 - DNA, 21 bp, Arabidopsis lyrata
agaatcttgatgatgctgcat

SEQ ID NO: 202 - DNA, 21 bp, Arabidopsis lyrata
agaatcttgatgatgctgcag

SEQ ID NO: 203 - DNA, 21 bp, Arabidopsis lyrata
agaatcttgatgatgctgcag

SEQ ID NO: 204 - DNA, 20 bp, Arabidopsis lyrata
gaatcttgatgatgctgcat

SEQ ID NO: 205 - DNA, 21 bp, Aquilegia caerulea
agaatcttgatgatgctgcat

SEQ ID NO: 206 - DNA, 21 bp, Aquilegia caerulea
ggaatcttgatgatgctgcat

SEQ ID NO: 207 - DNA, 21 bp, Aegilops speltoides
aggatcttgatgatgctgcag

SEQ ID NO: 208 - DNA, 23 bp, Aegilops tauschii
tgagaatcttgatgatgctgcat

SEQ ID NO: 209 - DNA, 21 bp, Arabidopsis thaliana
agaatcttgatgatgctgcat

SEQ ID NO: 210 - DNA, 21 bp, Arabidopsis thaliana
agaatcttgatgatgctgcat

SEQ ID NO: 211 - DNA, 21 bp, Arabidopsis thaliana
agaatcttgatgatgctgcag

SEQ ID NO: 212 - DNA, 21 bp, Arabidopsis thaliana
agaatcttgatgatgctgcag

SEQ ID NO: 213 - DNA, 21 bp, Arabidopsis thaliana
ggaatcttgatgatgctgcat

SEQ ID NO: 214 - DNA, 21 bp, Arabidopsis thaliana
agaatcctgatgatgctgcag

SEQ ID NO: 215 - DNA, 21 bp, Brachypodium distachyon
agaatcttgatgatgctgcat

SEQ ID NO: 216 - DNA, 21 bp, Brachypodium distachyon
ggaatcttgatgatgctgcat

SEQ ID NO: 217 - DNA, 21 bp, Brachypodium distachyon
agaatcctgatgatgctgcag

SEQ ID NO: 218 - DNA, 21 bp, Brassica oleracea
agaatcttgatgatgctgcat

SEQ ID NO: 219 - DNA, 21 bp, Brassica oleracea
agaatcttgatgatgctgcat

SEQ ID NO: 220 - DNA, 21 bp, Brassica rapa
agaatcttgatgatgctgcat

SEQ ID NO: 221 - DNA, 21 bp, Brassica rapa
agaatcttgatgatgctgcat

SEQ ID NO: 222 - DNA, 20 bp, Citrus sinensis
agaatcttgatgatgctgca

SEQ ID NO: 223 - DNA, 20 bp, Citrus sinensis
agaatcttgatgatgctgca

SEQ ID NO: 224 - DNA, 21 bp, Citrus sinensis
agaatcttgatgatgcggcaa

SEQ ID NO: 225 - DNA, 22 bp, Citrus sinensis
tggaatcttgatgatgctgcag

SEQ ID NO: 226 - DNA, 21 bp, Gossypium hirsutum
agaatcctgatgatgctgcag

SEQ ID NO: 227 - DNA, 21 bp, Glycine max
agaatcttgatgatgctgcat

SEQ ID NO: 228 - DNA, 21 bp, Glycine max
agaatcttgatgatgctgcat

SEQ ID NO: 229 - DNA, 21 bp, Glycine max
ggaatcttgatgatgctgcag

SEQ ID NO: 230 - DNA, 24 bp, Glycine max
ggaatcttgatgatgctgcagcag

SEQ ID NO: 231 - DNA, 24 bp, Glycine max
ggaatcttgatgatgctgcagcag

SEQ ID NO: 232 - DNA, 20 bp, Glycine max
agaatcttgatgatgctgca

SEQ ID NO: 233 - DNA, 21 bp, Gossypium raimondii
agaatcttgatgatgctgcat

SEQ ID NO: 234 - DNA, 21 bp, Gossypium raimondii
aaaatcttgatgatgctgcat

SEQ ID NO: 235 - DNA, 21 bp, Hordeum vulgare
agaatcctgatgatgctgcag

SEQ ID NO: 236 - DNA, 21 bp, Hordeum vulgare
agaatcctgatgatgctgcag

SEQ ID NO: 237 - DNA, 21 bp, Hordeum vulgare
agaatcctgatgatgctgcag

SEQ ID NO: 238 - DNA, 21 bp, Hordeum vulgare
agaatcctgatgatgctgcag

SEQ ID NO: 239 - DNA, 21 bp, Manihot esculenta
agaatcttgatgatgctgcat

SEQ ID NO: 240 - DNA, 21 bp, Medicago truncatula
agaatcctgatgatgctgcag

SEQ ID NO: 241 - DNA, 21 bp, Medicago truncatula
ggaatcttgatgattctgcac

SEQ ID NO: 242 - DNA, 21 bp, Oryza sativa
agaatcttgatgatgctgcat

SEQ ID NO: 243 - DNA, 21 bp, Oryza sativa
ggaatcttgatgatgctgcat

SEQ ID NO: 244 - DNA, 21 bp, Oryza sativa
tgaatcttgatgatgctgcac

SEQ ID NO: 245 - DNA, 21 bp, Oryza sativa
agaatcttgatgatgctgcat

SEQ ID NO: 246 - DNA, 21 bp, Oryza sativa
agaatcctgatgatgctgcag

SEQ ID NO: 247 - DNA, 21 bp, Oryza sativa
agaatcctgatgatgctgcag

SEQ ID NO: 248 - DNA, 21 bp, Oryza sativa
agaatcctgatgatgctgcag

SEQ ID NO: 249 - DNA, 21 bp, Oryza sativa
agaatcctgatgatgctgcag

SEQ ID NO: 250 - DNA, 21 bp, Picea glauca
agaatcctgatgatgctgcac

SEQ ID NO: 251 - DNA, 21 bp, Populus trichocarpa x Populus deltoides
agaatcttgatgatgctgcat

SEQ ID NO: 252 - DNA, 21 bp, Populus trichocarpa x Populus deltoides
tgaatcttgatgatgctccac

SEQ ID NO: 253 - DNA, 21 bp, Picea sitchensis
agaatcctgatgatgctgcac

SEQ ID NO: 254 - DNA, 21 bp, Populus trichocarpa
agaatcttgatgatgctgcat

SEQ ID NO: 255 - DNA, 21 bp, Populus trichocarpa
agaatcttgatgatgctgcat

SEQ ID NO: 256 - DNA, 21 bp, Populus trichocarpa
agaatcttgatgatgctgcat

SEQ ID NO: 257 - DNA, 21 bp, Populus trichocarpa
ggaatcttgatgatgctgcat

SEQ ID NO: 258 - DNA, 21 bp, Populus trichocarpa
ggaatcttgatgatgctgcat

SEQ ID NO: 259 - DNA, 21 bp, Populus trichocarpa
agaatcttgatgatgctgcat

SEQ ID NO: 260 - DNA, 21 bp, Populus trichocarpa
ggaatcttgatgatgctgcag

SEQ ID NO: 261 - DNA, 21 bp, Populus trichocarpa
ggaatcttgatgatgctgcag

SEQ ID NO: 262 - DNA, 21 bp, Populus trichocarpa
agaatcctgatgatgctgcaa

SEQ ID NO: 263 - DNA, 21 bp, Ricinus communis
ggaatcttgatgatgctgcag

SEQ ID NO: 264 - DNA, 20 bp, Sorghum bicolor
agaatcttgatgatgctgca

SEQ ID NO: 265 - DNA, 20 bp, Sorghum bicolor
ggaatcttgatgatgctgca

SEQ ID NO: 266 - DNA, 20 bp, Sorghum bicolor
agaatcttgatgatgctgca

SEQ ID NO: 267 - DNA, 20 bp, Sorghum bicolor
agaatcttgatgatgctgca

SEQ ID NO: 268 - DNA, 21 bp, Sorghum bicolor
tgaatcttgatgatgctgcac

SEQ ID NO: 269 - DNA, 21 bp, Sorghum bicolor
agaatcctgatgatgctgcac

SEQ ID NO: 270 - DNA, 21 bp, Solanum lycopersicum
agaatcttgatgatgctgcat

SEQ ID NO: 271 - DNA, 21 bp, Solanum lycopersicum
agaatcttgatgatgctgcat

SEQ ID NO: 272 - DNA, 21 bp, Saccharum officinarum
agaatcctgatgatgctgcag

SEQ ID NO: 273 - DNA, 21 bp, Solanum tuberosum
agaatcttgatgatgctgcat

SEQ ID NO: 274 - DNA, 21 bp, Triticum aestivum
agaatcctgatgatgctgcag

SEQ ID NO: 275 - DNA, 21 bp, Triticum aestivum
agaatcctgatgatgctgcag

SEQ ID NO: 276 - DNA, 21 bp, Triticum aestivum
aggatcttgatgatgctgcag

SEQ ID NO: 277 - DNA, 21 bp, Theobroma cacao
agaatcctgatgatgctgcag

SEQ ID NO: 278 - DNA, 20 bp, Theobroma cacao
ggaatcttgatgatgctgca

SEQ ID NO: 279 - DNA, 21 bp, Theobroma cacao
agaatcttgatgatgctgcat

SEQ ID NO: 280 - DNA, 21 bp, Theobroma cacao
ggaatcttgatgatgctgcat

SEQ ID NO: 281 - DNA, 21 bp, Theobroma cacao
agaatcctgatgatgctgcat

SEQ ID NO: 282 - DNA, 21 bp, Theobroma cacao
agaatcttgatgatgctgcat

SEQ ID NO: 283 - DNA, 21 bp, Vitis vinifera
tgaatcttgatgatgctacat

SEQ ID NO: 284 - DNA, 21 bp, Vitis vinifera
tgaatcttgatgatgctacac

SEQ ID NO: 285 - DNA, 21 bp, Vitis vinifera
ggaatcttgatgatgctgcag

SEQ ID NO: 286 - DNA, 23 bp, Vitis vinifera
tgagaatcttgatgatgctgcat

SEQ ID NO: 287 - DNA, 20 bp, Zea mays
agaatcttgatgatgctgca

SEQ ID NO: 288 - DNA, 20 bp, Zea mays
agaatcttgatgatgctgca

SEQ ID NO: 289 - DNA, 20 bp, Zea mays
agaatcttgatgatgctgca

SEQ ID NO: 290 - DNA, 20 bp, Zea mays
agaatcttgatgatgctgca

SEQ ID NO: 291 - DNA, 21 bp, Zea mays
ggaatcttgatgatgctgcat

SEQ ID NO: 292 - DNA, 21 bp, Zea mays
agaatcctgatgatgctgcag

SEQ ID NO: 293 - DNA, 21 bp, Zea mays
agaatcctgatgatgctgcat

SEQ ID NO: 294 - DNA, 21 bp, Arabidopsis lyrata
ctgaagtgtttggggggactc

SEQ ID NO: 295 - DNA, 21 bp, Arabidopsis lyrata
ctgaagtgtttggggggactt

SEQ ID NO: 296 - DNA, 21 bp, Arabidopsis lyrata
ctgaagtgtttgggggaactc

SEQ ID NO: 297 - DNA, 21 bp, Arabidopsis lyrata
ctgaagtgtttgggggaactc

SEQ ID NO: 298 - DNA, 21 bp, Arabidopsis lyrata
ctgaagtgtttggggggactc

SEQ ID NO: 299 - DNA, 21 bp, Arabidopsis lyrata
ctgaagtgtttgggggaactc

SEQ ID NO: 300 - DNA, 21 bp, Arabidopsis lyrata
ctgaagtgtttggggggactc

SEQ ID NO: 301 - DNA, 21 bp, Arabidopsis lyrata
ctgaagtgtttggaggaactc

SEQ ID NO: 302 - DNA, 21 bp, Aquilegia caerulea
ctgaagggtttggaggaactc

SEQ ID NO: 303 - DNA, 21 bp, Aquilegia caerulea
ctgaagggtttggaggaactc

SEQ ID NO: 304 - DNA, 21 bp, Arabidopsis thaliana
ctgaagtgtttgggggaactc

SEQ ID NO: 305 - DNA, 21 bp, Arabidopsis thaliana
ctgaagtgtttggggggactc

SEQ ID NO: 306 - DNA, 21 bp, Arabidopsis thaliana
ctgaagtgtttggggggactc

SEQ ID NO: 307 - DNA, 21 bp, Arabidopsis thaliana
ctgaagtgtttgggggaactc

SEQ ID NO: 308 - DNA, 21 bp, Arabidopsis thaliana
ctgaagtgtttgggggaactc

SEQ ID NO: 309 - DNA, 21 bp, Arabidopsis thaliana
ctgaagtgtttggggggactc

SEQ ID NO: 310 - DNA, 20 bp, Brachypodium distachyon
tgaagtgtttgggggaactc

SEQ ID NO: 311 - DNA, 20 bp, Brachypodium distachyon
tgaagtgtttgggggaactc

SEQ ID NO: 312 - DNA, 20 bp, Brachypodium distachyon
tgaagtgtttgggggaactc

SEQ ID NO: 313 - DNA, 21 bp, Brachypodium distachyon
aagtgtttggggaactctagg

SEQ ID NO: 314 - DNA, 20 bp, Brachypodium distachyon
tgaagtgtttgggggaactc

SEQ ID NO: 315 - DNA, 20 bp, Brachypodium distachyon
tgaagtgtttgggggaactc

SEQ ID NO: 316 - DNA, 20 bp, Brachypodium distachyon
tgaagtgtttgggggaactc

SEQ ID NO: 317 - DNA, 20 bp, Brachypodium distachyon
tgaagtgtttgggggaactc

SEQ ID NO: 318 - DNA, 20 bp, Brachypodium distachyon
tgaagtgtttgggggaactc

SEQ ID NO: 319 - DNA, 20 bp, Brachypodium distachyon
tgaagtgtttgggggaactc

SEQ ID NO: 320 - DNA, 20 bp, Brachypodium distachyon
tgaagtgtttgggggaactc

SEQ ID NO: 321 - DNA, 20 bp, Brachypodium distachyon
tgaagtgtttgggggaactc

SEQ ID NO: 322 - DNA, 20 bp, Brachypodium distachyon
tgaagtgtttgggggaactc

SEQ ID NO: 323 - DNA, 20 bp, Brachypodium distachyon
tgaagtgtttgggggaactc

SEQ ID NO: 324 - DNA, 21 bp, Citrus sinensis
ctgaagtgtttgggggaactc

SEQ ID NO: 325 - DNA, 21 bp, Gossypium hirsutum
ttgaagtgtttgggggaactt

SEQ ID NO: 326 - DNA, 21 bp, Gossypium hirsutum
ctaaagtgtttaggggaactc

SEQ ID NO: 327 - DNA, 21 bp, Gossypium hirsutum
ctgaagtgtttgggggaactc

SEQ ID NO: 328 - DNA, 21 bp, Glycine max
atgaagtgtttgggggaactc

SEQ ID NO: 329 - DNA, 21 bp, Medicago truncatula
atgaagtgtttgggggaactc

SEQ ID NO: 330 - DNA, 21 bp, Medicago truncatula
atgaagtatttgggggaactc

SEQ ID NO: 331 - DNA, 21 bp, Medicago truncatula
atgaagtgtttgggggaactc

SEQ ID NO: 332 - DNA, 21 bp, Medicago truncatula
atgaagtgtttgggggaactc

SEQ ID NO: 333 - DNA, 21 bp, Medicago truncatula
atgaagtgtttgggggaactc

SEQ ID NO: 334 - DNA, 21 bp, Medicago truncatula
atgaagtgtttgggggaactc

SEQ ID NO: 335 - DNA, 21 bp, Medicago truncatula
ttgaagtgtttgggggaactc

SEQ ID NO: 336 - DNA, 21 bp, Medicago truncatula
atgaagtgtttgggggaactt

SEQ ID NO: 337 - DNA, 21 bp, Medicago truncatula
atgaagtgtttgggggaactc

SEQ ID NO: 338 - DNA, 21 bp, Medicago truncatula
atgaagtgtttgggggaactc

SEQ ID NO: 339 - DNA, 21 bp, Medicago truncatula
atgaagtgtttgggggaactc

SEQ ID NO: 340 - DNA, 21 bp, Medicago truncatula
atgaagtgtttgggggaactc

SEQ ID NO: 341 - DNA, 21 bp, Medicago truncatula
atgaagtgtttgggggaactc

SEQ ID NO: 342 - DNA, 21 bp, Medicago truncatula
atgaagtgtttgggggaactc

SEQ ID NO: 343 - DNA, 21 bp, Medicago truncatula
atgaagtgtttgggggaactc

SEQ ID NO: 344 - DNA, 21 bp, Medicago truncatula
ttgaagcgtttgggggaactc

SEQ ID NO: 345 - DNA, 21 bp, Medicago truncatula
atgaagtgtttgggggaactc

SEQ ID NO: 346 - DNA, 21 bp, Medicago truncatula
atgaagtgtttgggggaactc

SEQ ID NO: 347 - DNA, 21 bp, Oryza sativa
gtgaagtgcttgggggaactc

SEQ ID NO: 348 - DNA, 20 bp, Oryza sativa
tgaagtgcttgggggaactc

SEQ ID NO: 349 - DNA, 21 bp, Oryza sativa
gtgaagtgtttgggggaactc

SEQ ID NO: 350 - DNA, 21 bp, Oryza sativa
gtgaagtgtttggaggaactc

SEQ ID NO: 351 - DNA, 21 bp, Oryza sativa
gtgaagtgtttgggggaactc

SEQ ID NO: 352 - DNA, 21 bp, Oryza sativa
gtgaagtgtttgggggaactc

SEQ ID NO: 353 - DNA, 21 bp, Oryza sativa
gtgaattgtttgggggaactc

SEQ ID NO: 354 - DNA, 21 bp, Oryza sativa
gtgaagtgtttgggggaactc

SEQ ID NO: 355 - DNA, 21 bp, Oryza sativa
gtgaagtgtttgggggaactc

SEQ ID NO: 356 - DNA, 21 bp, Oryza sativa
gtgaagtgtttgggggaactc

SEQ ID NO: 357 - DNA, 21 bp, Oryza sativa
gtgaagtgtttgggggaactc

SEQ ID NO: 358 - DNA, 21 bp, Oryza sativa
gtgaagtgtttgggggaactc

SEQ ID NO: 359 - DNA, 21 bp, Oryza sativa
gtgaagtgtttgggggaactc

SEQ ID NO: 360 - DNA, 21 bp, Oryza sativa
gtgaagtgtttgggggaactc

SEQ ID NO: 361 - DNA, 21 bp, Oryza sativa
gtgaagtgtttgggggaactc

SEQ ID NO: 362 - DNA, 21 bp, Oryza sativa
atgaagtgtttggaggaactc

SEQ ID NO: 363 - DNA, 21 bp, Oryza sativa
gtgaagtgtttgggggaactc

SEQ ID NO: 364 - DNA, 21 bp, Oryza sativa
gtgaagtgtttgggggaactc

SEQ ID NO: 365 - DNA, 21 bp, Oryza sativa
gtgaagtgtttgggggaactc

SEQ ID NO: 366 - DNA, 21 bp, Oryza sativa
gtgaagtgtttgggggaactc

SEQ ID NO: 367 - DNA, 21 bp, Oryza sativa
gtgaagtgtttggggaaactc

SEQ ID NO: 368 - DNA, 21 bp, Oryza sativa
gtgaagcgtttgggggaaatc

SEQ ID NO: 369 - DNA, 21 bp, Oryza sativa
gtgaagtatttggcggaactc

SEQ ID NO: 370 - DNA, 22 bp, Oryza sativa
gtgaagtgtttgggggattctc

SEQ ID NO: 371 - DNA, 21 bp, Oryza sativa
gtgaagtgtttggagtagctc

SEQ ID NO: 372 - DNA, 21 bp, Oryza sativa
gtgaagtgtttgggggaactc

SEQ ID NO: 373 - DNA, 21 bp, Picea abies
ctgaagtgtttggaggaactt

SEQ ID NO: 374 - DNA, 21 bp, Populus trichocarpa
ctgaagggtttggaggaactc

SEQ ID NO: 375 - DNA, 21 bp, Populus trichocarpa
ctgaagtgtttgggggaactc

SEQ ID NO: 376 - DNA, 21 bp, Populus trichocarpa
ctgaagtgtttgggggaactc

SEQ ID NO: 377 - DNA, 21 bp, Populus trichocarpa
ctgaagtgtttgggggaactc

SEQ ID NO: 378 - DNA, 21 bp, Populus trichocarpa
ctgaagtgtttgggggaactc

SEQ ID NO: 379 - DNA, 21 bp, Populus trichocarpa
ctgaagtgtttgggggaactc

SEQ ID NO: 380 - DNA, 21 bp, Populus trichocarpa
ctgaagtgtttgggggaactc

SEQ ID NO: 381 - DNA, 21 bp, Populus trichocarpa
ctgaagtgtttgggggaactc

SEQ ID NO: 382 - DNA, 21 bp, Populus trichocarpa
ctgaagtgtttgggggaactc

SEQ ID NO: 383 - DNA, 21 bp, Populus trichocarpa
ctgaagtgtttgggggaactc

SEQ ID NO: 384 - DNA, 21 bp, Ricinus communis
ctgaagtgtttgggggaactc

SEQ ID NO: 385 - DNA, 21 bp, Ricinus communis
ctgaagtgtttgggggaactc

SEQ ID NO: 386 - DNA, 21 bp, Ricinus communis
ctgaagtgtttgggggaactc

SEQ ID NO: 387 - DNA, 21 bp, Ricinus communis
ctgaagtgtttgggggaactc

SEQ ID NO: 388 - DNA, 21 bp, Ricinus communis
ctgaagtgtttgggggaactc

SEQ ID NO: 389 - DNA, 21 bp, Sorghum bicolor
gtgaagtgtttgggggaactc

SEQ ID NO: 390 - DNA, 21 bp, Sorghum bicolor
gtgaagtgtttgggggaactc

SEQ ID NO: 391 - DNA, 21 bp, Sorghum bicolor
gtgaagtgtttgggggaactc

SEQ ID NO: 392 - DNA, 21 bp, Sorghum bicolor
gtgaagtgtttgggggaactc

SEQ ID NO: 393 - DNA, 21 bp, Sorghum bicolor
gtgaagtgtttgggggaactc

SEQ ID NO: 394 - DNA, 21 bp, Sorghum bicolor
atgaagtgtttgggggaactc

SEQ ID NO: 395 - DNA, 21 bp, Sorghum bicolor
gtgaagtgtttgggggaactc

SEQ ID NO: 396 - DNA, 21 bp, Sorghum bicolor
gtgaagtgtttgggggaactc

SEQ ID NO: 397 - DNA, 21 bp, Sorghum bicolor
gtgaagtgtttgggggaactc

SEQ ID NO: 398 - DNA, 21 bp, Sorghum bicolor
gtgaagtgtttgggggaactc

SEQ ID NO: 399 - DNA, 21 bp, Sorghum bicolor
gtgaagtgtttggaggaactc

SEQ ID NO: 400 - DNA, 21 bp, Sorghum bicolor
gtgaagtgcttgggggaactc

SEQ ID NO: 401 - DNA, 21 bp, Solanum demissum
ctgaagtgtttgggggaactc

SEQ ID NO: 402 - DNA, 22 bp, Solanum lycopersicum
ctgaagtgtttgggggaactcc

SEQ ID NO: 403 - DNA, 22 bp, Solanum lycopersicum
ctgaagtgtttgggggaactcc

SEQ ID NO: 404 - DNA, 21 bp, Triticum aestivum
gtgaagtgtttgggggaactc

SEQ ID NO: 405 - DNA, 20 bp, Triticum aestivum
tgaagtgtttgggggaactc

SEQ ID NO: 406 - DNA, 21 bp, Theobroma cacao
ctgaagtgtttgggggaactc

SEQ ID NO: 407 - DNA, 21 bp, Theobroma cacao
ctgaagtgtttgggggaactc

SEQ ID NO: 408 - DNA, 21 bp, Vitis vinifera
ctgaagtgtttgggggaactc

SEQ ID NO: 409 - DNA, 21 bp, Vitis vinifera
ctgaagtgtttgggggaactc

SEQ ID NO: 410 - DNA, 21 bp, Vitis vinifera
ctgaagtgtttgggggaactc

SEQ ID NO: 411 - DNA, 21 bp, Vitis vinifera
ctgaagtgtttgggggaactc

SEQ ID NO: 412 - DNA, 21 bp, Vitis vinifera
ctgaagtgtttgggggaactc

SEQ ID NO: 413 - DNA, 21 bp, Vitis vinifera
ctgaagtgtttgggggaactc

SEQ ID NO: 414 - DNA, 21 bp, Vitis vinifera
ctgaagtgtttgggggaactc

SEQ ID NO: 415 - DNA, 21 bp, Vitis vinifera
ctgaagtgtttgggggaactc

SEQ ID NO: 416 - DNA, 21 bp, Vitis vinifera
ctgaagtgtttgggggaactc

SEQ ID NO: 417 - DNA, 21 bp, Vitis vinifera
ctgaagtgtttgggggaactc

SEQ ID NO: 418 - DNA, 21 bp, Vitis vinifera
ctgaagtgtttgggggaactc

SEQ ID NO: 419 - DNA, 21 bp, Vitis vinifera
ctgaagtgtttgggggaactc

SEQ ID NO: 420 - DNA, 21 bp, Vitis vinifera
ctgaagtgtttgggggaactc

SEQ ID NO: 421 - DNA, 21 bp, Vitis vinifera
ctgaagagtctggaggaactc

SEQ ID NO: 422 - DNA, 21 bp, Zea mays
gtgaagtgtttgggggaactc

SEQ ID NO: 423 - DNA, 21 bp, Zea mays
gtgaagtgtttggaggaactc

SEQ ID NO: 424 - DNA, 21 bp, Zea mays
gtgaagtgtttgggggaactc

SEQ ID NO: 425 - DNA, 21 bp, Zea mays
gtgaagtgtttgggggaactc

SEQ ID NO: 426 - DNA, 21 bp, Zea mays
gtgaagtgtttgggggaactc

SEQ ID NO: 427 - DNA, 21 bp, Zea mays
gtgaagtgtttgggggaactc

SEQ ID NO: 428 - DNA, 21 bp, Zea mays
gtgaagtgtttgggggaactc

SEQ ID NO: 429 - DNA, 21 bp, Zea mays
gtgaagtgtttgggggaactc

SEQ ID NO: 430 - DNA, 21 bp, Zea mays
gtgaagtgtttgggggaactc

SEQ ID NO: 431 - DNA, 21 bp, Zea mays
gtgaagtgtttgaggaaactc

SEQ ID NO: 432 - DNA, 21 bp, Zea mays
gtgaagtgtttggaggaactc

SEQ ID NO: 433 - DNA, 21 bp, Zea mays
gtgaagtgtttggaggaactc

SEQ ID NO: 434 - DNA, 21 bp, Zea mays
gtgaagtgtttgggggaactc

SEQ ID NO: 435 - DNA, 21 bp, Zea mays
gtgaagtgtttgggtgaactc

SEQ ID NO: 436 - DNA, 21 bp, Zea mays
gtgaagtgtttgggggaactc

SEQ ID NO: 437 - DNA, 21 bp, Aquilegia caerulea
agaagagagagagcacaaccc

SEQ ID NO: 438 - DNA, 21 bp, Brachypodium distachyon
agaagagagagagtacagcct

SEQ ID NO: 439 - DNA, 21 bp, Festuca arundinacea
agaagagagagagcacagctt

SEQ ID NO: 440 - DNA, 21 bp, Oryza sativa
agaagagagagagtacagctt

SEQ ID NO: 441 - DNA, 21 bp, Physcomitrella patens
cgaagagagagagcacagccc

SEQ ID NO: 442 - DNA, 21 bp, Physcomitrella patens
cgaagagagagagcacagccc

SEQ ID NO: 443 - DNA, 21 bp, Physcomitrella patens
cgaagagagagagcacagccc

SEQ ID NO: 444 - DNA, 21 bp, Physcomitrella patens
agaagagagagagcacagccc

SEQ ID NO: 445 - DNA, 21 bp, Physcomitrella patens
agaagagagagagtacagccc

SEQ ID NO: 446 - DNA, 21 bp, Physcomitrella patens
agaagagagagagtacagccc

SEQ ID NO: 447 - DNA, 21 bp, Physcomitrella patens
cgaagagagagagcacagtcc

SEQ ID NO: 448 - DNA, 22 bp, Brachypodium distachyon
tagccaaggatgatttgcctgt

SEQ ID NO: 449 - DNA, 21 bp, Sorghum bicolor
tagccaaggatgatttgcctg

SEQ ID NO: 450 - DNA, 21 bp, Vitis vinifera
agaatcttgatgatgctgcat

SEQ ID NO: 451 - DNA, 20 bp, Zea mays
gtgaagtgtttggaggaact

SEQ ID NO: 452 - DNA, 21 bp, Zea mays
gtgaagtgtttggaggaactc

SEQ ID NO: 453 - DNA, 21 bp, Zea mays
gtgaagtgtttgaggaaactc

SEQ ID NO: 454 - DNA, 173 bp, Arabidopsis lyrata
gtgcccaacggagtagaattgcatgaagtggagtagagtataatgcagccaaggatgacttgccggaacgttgttaatcatacgtataaattatgtgatgaacatatttctggcaagttgtccttcggctacattttgctctcttcttctcatgcaaactctctttgggatat

SEQ ID NO: 455 - DNA, 292 bp, Arabidopsis lyrata
gtctcatctaaagccttgaatgtgggaaaaaggccattgttgttcagccaaggatgacttgccggtagctttgtatatttactctatattcggtttatattatggagattatgctttatatatatatatacatagttttaattgattttttttcgtacgtacgtaatctaatacgaaaaagtatttacttatttatatgtgtgttggtgagatgtgtaaacaaagcaagcccggcaagtcatctctggctatgcaactgcctcttcctctcattctaggcttacgatgacac

SEQ ID NO: 456 - DNA, 205 bp, Arabidopsis lyrata
tagaaaatcatataagagaaaatggtgacatgaagaatgagaacttgtgtggtagccaaggatgacttgcctgcgttttaacaatacaatatcaaagactactcgatcgatcgatagtcttagagttggttagtcgtcaggcagtctccttggctattcaaacaattcttgttctcctcatttcacatctctctttcgttttttg

SEQ ID NO: 457 - DNA, 210 bp, Arabidopsis lyrata
gaaggagatgtcaaagatgagtaggagaatcatatttggtagccaaggatgacttgcctgattcctttgcgtaaaatggttagtgtcatgtttgacaaagtgactatcaattacatcaagcgatgaccattttgcttataaaaaagatgtcaggcagtctccttggatatccttatatgttcttctctttcatctcagacattcatcttc

SEQ ID NO: 458 - DNA, 300 bp, Arabidopsis lyrata
gaatgaggcaaaacatattgagtaatggagtgtataatgaggaagagaggtctaacatggcgaaaagagtcatgtttaatagccaaggatgacttgcctgatctttttcacctccatgattcaatttgaagttcatgcgttttggattattatgcatctaaaaggtataataattcgaaaatcatgttgaatcatgcgggttaggtttcaggcagtctccttggctatcttgacatgcttttttcatccatgttatacctgtttttctttctgtctctaaagtcactattaagtctcttc

SEQ ID NO: 459 - DNA, 203 bp, Arabidopsis lyrata
gaaggagatgtcaaagatgaataagagaaccacatttggtagccaaggatgacttgcctgtttctttgaacaaaatggttggtgtcatgtttgatgtgactacaagttatatcaagaatgacattttgcttataaaaagacatcaggcagtctccttggctatccttatatgttcttctttctcatctcagacatttaccttc

SEQ ID NO: 460 - DNA, 272 bp, Arabidopsis lyrata
gttaagaaatgtatgatgaagatgagaggtctaacatggcgaaaagagtcatgtttaatagccaaggatgacttgcctgatctttttcacctccatgattcaatttgaatttcatgggttttggattattatgcatctaaaaggtgtaataattcgaaaatcaagttgaatcttgcgggttaggtttcaggcagtctccttggctatcttgacatactcttttcatccatgttatacctaattttctttttttattgaggatatttgaggat

SEQ ID NO: 461 - DNA, 230 bp, Arabidopsis lyrata
tcattatttagaaggaaatgtcaaagatgaataggagaatcatatttggtagccaaggatgacttgcctgtttctttgagtaaaatggttattgtcatgtttgacaagtgactataagttatatcaagtaacgaccattttactcatcaaaagacatgaggcagtcttcttggctatccttatatgttcttctgtctcatctcagacgttaaccttcatctaaaataaga

SEQ ID NO: 462 - DNA, 252 bp, Arabidopsis lyrata
gaagtgtataacgaggaaaagaggtctaacatggcgaaaagagtcatgtttagtagccaaagatgacttgcctgatctttttcacctccatgattcaatttgaattccatgggttttggattattatgcattttaaaagcataatagttcgaaaatcatgttgaatcttgcgggttaggtttcaggcagtctctttggctatcttgacatgcttttttcattcatgttatacctatttttctttctgtcttc

SEQ ID NO: 463 - DNA, 158 bp, Aquilegia caerulea
gcatgaaagtaggaggcgtgtttagtagccaaggatgacttgcctaccaagggtctcattttaaggcattatcttccttggataatgcgtctggaatcctcgactggttaataggcagtctccttggccaacttgactgcctcctattactcatgcta

SEQ ID NO: 464 - DNA, 180 bp, Aquilegia caerulea
tagccaaggatgacttgcctgtatcctcttagaggccggcctgcgcgcctgtctctatattatcatacattggaatatatcatccttgtgtggttaataggcgggcctgcctgtctctatattatcatacattggaatatatcatccttgtgtggttaataggcagtctccttggctaac

SEQ ID NO: 465 - DNA, 111 bp, Aquilegia caerulea
aatgcagccaaggatgacttgccggaacgttgttaaccatgcatatgaataatgtgatgattaattatgtgatgaacatatttctggcaagttgtccttcggctacatttt

SEQ ID NO: 466 - DNA, 144 bp, Aegilops tauschii
gagtggtatcatcttttagctcttgcatgtggggaggaggacatgtagccaaggatgaattgccagcgcggagtgatccgtcgcgcaggcaagtcattactggctacgtgtttgcctcgtttcctcatgctggagcgaagatgt

SEQ ID NO: 467 - DNA, 181 bp, Arabidopsis thaliana
cccaacggagtagaattgcatgaagtggagtagagtataatgcagccaaggatgacttgccggaacgttgttaaccatgcatatgaataatgtgatgattaattatgtgatgaacatatttctggcaagttgtccttcggctacattttgctctcttcttctcatgcaaactttccttggg

SEQ ID NO: 468 - DNA, 411 bp, Arabidopsis thaliana
tcgtccattatgagtattaattatggttagggaatcttacagaatgaaaatgaaggtgtgaatggattgtctcatctaaagccttgaatgtgggaaaaaggccattgttgttcagccaaggatgacttgccggtagcttgtattatgattactctatattcgatttatattatggagatgatggtttatatatatttacttatctacatagttttagttgattttttttcgtacgtaatataatacgaaaaagtatttacttatttatatatgtgtgttggggcaagaagtgtaaccaagctagcccggcaagtcatctatggctatgcaactgtctcttcctctcattctaggcttacgatgacacgtaaaaaatcccaaatatcactaatatgatatgaatatggatga

SEQ ID NO: 469 - DNA, 190 bp, Arabidopsis thaliana
tcatataagagaaaatggtgacatgaagaatgagaacttgtgtggtagccaaggatgacttgcctgcgttttagaccatatatatcaaagactcactcgatcgatagtcttagagttggttggtcgtcaggcagtctccttggctattcaaacaattctcattctcttcattcacatttctcttttttgg

SEQ ID NO: 470 - DNA, 206 bp, Arabidopsis thaliana
gaaggagatgtcaaagatgaatagaagaatcatatttggtagccaaggatgacttgcctgactctttgtgtaaaatgtttagtgtcttgtttgaagtcactataagttgtatcaagcaatgaccattttgcttataaaaaagatatcaggcagtctccttggctatccttatatgttcttctctttcatctcagacattcaccttc

SEQ ID NO: 471 - DNA, 221 bp, Arabidopsis thaliana
gagtataatgaggaagagaggtctaacatggcgaaaagagtcatgtttagtagccaaggatgacttgcctgatctttttcacctccatgattcaatttgtaattcatgggttttggattattatacattcaaaagtataataatttgaaatcatgttgaatcttgcgggttaggtttcaggcagtctccttggctatcttgacatgcttttttcattcacg

SEQ ID NO: 472 - DNA, 213 bp, Arabidopsis thaliana
ttagaaggagatgtcaaagatgaataggagaacaatatttggtagccaaggatgacttgcctgcttctctgaacaaaatggtcgatgtcatgttttgaagtgactataagttataccaagaaatgaccattttgtttataaatagacatcaggcagtctccttggctatccttatatgttcttctttctcaactcagatatttaccttcatcc

SEQ ID NO: 473 - DNA, 211 bp, Arabidopsis thaliana
atgaagaagagaggtctaatatggcgaaaagagtcatgtttaatagccaaggatgacttgcctgatctttttcacctccatgattcaattttaagttcgtggattttggattattatgcgtttaaaaggtataataatttgagatcatgttgaatcttgcgggttaggtttcaggcagtctctttggctatcttgacatgctttcttcatc

SEQ ID NO: 474 - DNA, 212 bp, Arabidopsis thaliana
tagaaggagaagtcaaagatgaatagaagaatcatatttggtagccaaggatgacttgcctgtttctttgagtaaaatgggttagtgtcatgtttgacaagtgactataagttatatcaagcaatgaccattttactcatcaaaagacatcaggcagtctccttggctatccttatatgttcttctctctcatctcagacgtttaccttcat

SEQ ID NO: 475 - DNA, 215 bp, Arabidopsis thaliana
gatgaagaagagaggtctaacatggcggaaagcgtcatgtttagtagccaaggatgacttgcctgatctttttcgcctccacgattcaatttcaaattcatgcattttggattattataccttttaaagtataataggtcaaatatcatgttgaatcttgcgggttaggtttcaggcagtctctttggctatcttgacatgctttttccatccat

SEQ ID NO: 476 - DNA, 106 bp, Brachypodium distachyon
gagatagagagtggaatgtagccaaggatgacttgccgggtatgtgcatgtacgcttcagggaattatatgcatccctggtctgaatccatgctgatatttcccgg

SEQ ID NO: 477 - DNA, 151 bp, Brachypodium distachyon
ttgccatacgctaagaggcagagaaggggatgcagccaaggatgacttgccggctcctggtgttgggggaattgcagctttgttgagccttgagttagccggcaggttgtccttggctacacctagttctcttcttctggtgtttggccct

SEQ ID NO: 478 - DNA, 187 bp, Brachypodium distachyon
atggagatggagagcctcccttgattttggtagccaagaatgacttgcctatgcttgccctctgctaaccagctagccatgcatggtaaccaatggacaaatttcttgtggttggcgtggttagtgtggttgcatgggtgggtcttcttggctagccagagcggctctcatccaccatgccaggcca

SEQ ID NO: 479 - DNA, 164 bp, Brachypodium distachyon
ccttacatggtgataaggggtttggccctgatagccaaggatgacttgcctgtgcatgtcctcccttgatcgcttgcataatttcatatatgcatgtgatctcgatttatcacaggcagtctccttggctagcctgggtgcctcttatcctccatgctaggcct

SEQ ID NO: 480 - DNA, 151 bp, Brachypodium distachyon
gggccatgcaggacgaggcacagagcaggatgcagccaaggatgacttgccggccggctggccggcaatgtcgccgccggcgtgacatgatgcttgcccggcaagtttgtccttggctacaccttgctctctgcccatcatgtgttgccct

SEQ ID NO: 481 - DNA, 181 bp, Brachypodium distachyon
ggtgttgcgtgggcagagaagaagccttacatggcagcaaggggcttatctctgatagccaaggatgacttgcctgtgtcatacttcaaggcttggcaacatgatgcatgagcctttgttgtagtctcataggcagtctccttggctagcctgagtggctcttgcggctcatgccaggctg

SEQ ID NO: 482 - DNA, 164 bp, Brachypodium distachyon
cttgcatgagggccagagcctgcttcctccggtagccaaggatgacttgcctatatttgctccttcagaagtcctggttaattacatgccaggtttcagatgagtttggcgataggcagtcaccttggctagcctgagtggctcttgcctcttatggaaggcct

SEQ ID NO: 483 - DNA, 183 bp, Brachypodium distachyon
cttacatggagataaggagcctacctctgttagccaggaatggcttgcctacgcacacatttttcggttcatcacaggggcaaaactaacttggagatagcccctagtatgatggacggagtgtggctgcatggtcaagccttcctgactaggagagtgctcctcatcccccatgctaggctg

SEQ ID NO: 484 - DNA, 174 bp, Brachypodium distachyon
tctttgcatggaagtaggaggccatctttgatagccaaggatgatttgcctgtaaaaccgattgtcgtcgcctctcggtgccgttccaggcactcgaagggagggcggcagcaacaggttctatgggcaagtcagcctggctacccgagtacctcttacccatattccatgcca

SEQ ID NO: 485 - DNA, 176 bp, Brassica napus
agatgaatagaagaatcatatttggtagccaaggatgacttgcctatttcttgagagtaaaatgggcatggtgtcatgttaaaagttactgtaggtagtttcaatttgaccattttccttacaaatgatattaggcagtctccttggctatccttatatgttcttctctctcatct

SEQ ID NO: 486 - DNA, 220 bp, Brassica napus
gaaggagatgtcaaagatgaataggagatttctatttggtagccaaggatgacttgcctacttctttgcgaaggaaaatggtcacggtgtcatgtttgaaagtgaatatacatttttaagagtatatcaattagtgaccattttgcgtataaaaagatattaggcagtctccttggctatccttatatgttcttctttctcatctcagacatttaccttc

SEQ ID NO: 487 - DNA, 277 bp, Brassica napus
gtttcaggcagtctccttggctatcttgacatgcttttttcttccatgttataccttctttctttgtatttttcgaatccaaataatatttttttctataaatttactacgaaaatcctttaaacaatctctaacaaagtatgttattagaaaactaccactttttgcatttattacaaatgcatgtacgtggtgagtgtatgcattctttagaaggaaatgtcaaaggtgaatagaagaatcatatttggtagccaaggatgacttgcctatttct

SEQ ID NO: 488 - DNA, 201 bp, Brassica napus
gtcaaagatgaataggagaattctatttggtagccaaggatgacttgcctacttctttgcgaaggaaaatggtcacggtgtcatgtttgaaagtgaatatatatttataagagtatatcaattagtgaccattttgcgtataaaaagatattaggcagtctccttggctatccttatatgttcttctttctcatctcagac

SEQ ID NO: 489 - DNA, 168 bp, Brassica napus
gagaaacggtgacatgaagaatgagaagttgtgtggtagccaaggatgacttgcctgcgtctttaacaccatatcaaagactttatcgatagtctctgagttggttaggctgtaggcagtctccttggctattcagacactcctctttctcctcatttcacatttctc

SEQ ID NO: 490 - DNA, 176 bp, Brassica napus
gagaaatggtgacatgaagaatgagaagttgtgtggtagccaaggatgacttgcctgcgtcttagaccatatctatcaaagactaaaagattgatagtcttcgatgaattggttaatcggtaggcagtctcctcggctattcagacagttctctttctcctcatttcacatttctc

SEQ ID NO: 491 - DNA, 174 bp, Brassica napus
agagtcatgtttagtagccaaggatgacttgcctgctctttttcacctccatgattcaattttatgtacagttttggattactatgcttctaaagagtatagtaattcaaaatcttgttgaatctttgagggtaacagtttcaggcagtctccttggctatcttgacatgcttt

SEQ ID NO: 492 - DNA, 167 bp, Brassica napus
gtgtttagtagccaaggatgacttgcctgctcttgttcacctccacgattcaactttatacgttgaagggttttggattattgtgcattcaacatgtataataatttgaaatcatgttgaatctttgtgggttaggtttcaggcagtctccttggctattttgacat

SEQ ID NO: 493 - DNA, 155 bp, Brassica napus
aaacggtgacatgaagaatgagaagttgtgtggtagccaaggatgacttgcctgcgtcttaacaccatatcacagactttatcgatagtctctgagttggttaggctgtaggcagtctcctcggctattcagacactcctctttctcctcatttc

SEQ ID NO: 494 - DNA, 199 bp, Brassica napus
catggcgaaaagagtcgtgtttagtagccaaggatgacttgcctgctcttgttcacctccacgattcaactttatacgttgaagggttttggattattgtgcattcaacatgtataataatttgaaatcatgttgaatctttgtgggttaggtttcaggcagtctccttggctattttgacatacttttttcatccatg

SEQ ID NO: 495 - DNA, 150 bp, Festuca arundinacea
ggcacgagggcaaagccttacatggctgcaagggccttacctctgatagccaaggatgacttgcctatgtcttcttcctccctcagatgcctaattagccttggaggtgtggggtctcatgggcagtcaccttggctagcctgagtggct

SEQ ID NO: 496 - DNA, 189 bp, Gossypium herbacium
tatagagaggaagaaaaggtctaacatgaagataaagagtcttgtttggtagccaaggatgacttgcctgcacctaatgtccacgaggttttaatacatcaaaaaccctggttgggtcccaggcagtcaccttggctaactagacaggctgttttcattcatgctaggcctcatcttccgccccattgg

SEQ ID NO: 497 - DNA, 121 bp, Glycine max
aagaggaagagagagtgatgcagccaaggatgacttgccggcgttattatttgctcatgttcatgctcaccggtttccttgccggcaagttgtgtttggctatgttttgctctcttcttct

SEQ ID NO: 498 - DNA, 88 bp, Glycine max
agattagtggatgtgagccaaggatgacttgccggttgtataatagcacccggtttaagtccttcttggttcttatttactattctta

SEQ ID NO: 499 - DNA, 120 bp, Glycine max
gtcttgcatgaagaggtagagagagtgcttttgagccaaggatgacttgccggcgtaattacgggtattgccagcgagacatccttgttcacttatgctctcttttcactcatataagac

SEQ ID NO: 500 - DNA, 83 bp, Hordeum vulgare
taacacgccagaaataaagccaaggatgagttgcctgatcatcaggactcatggaggtagggctttctgtttttggtgagttt

SEQ ID NO: 501 - DNA, 85 bp, Medicago truncatula
gaatgcagccaagggtgatttgccggcagatatatatgaatattcatagagatgcatgtgtcggcaagttcctcttggctacatt

SEQ ID NO: 502 - DNA, 240 bp, Medicago truncatula
agatgaagccaaggatgacttgccggtataatagtaatttgccacaaatctagatagctattagctatgtttggatgggcggtgagattaacaaaattacagcagcattgtgattttgttgatgctttaaagtgtagtttttatcaaaattacagtggttcactgtaattatgagaatctcaccgtcaatctaaatatgcatttagtttcatttccggcaggtcatccttcggctatatt

SEQ ID NO: 503 - DNA, 139 bp, Medicago truncatula
tttataagccaaggatgacttgcctagctaaaaaccatttacattaattggggacttaatttgtatatgttatgtctgatcgatgatgagtatgtcccttgtttagtttattagcaggcaggtatcctaggctttttga

SEQ ID NO: 504 - DNA, 211 bp, Medicago truncatula
atatgcagccaaggatgacttgccggcgagcctctttcgatacttttatgacataattaatcatgtggatagccaaggtactaaactcactttgcactaaaacaaatatttttgctttagtgcaaacttagtttaggcgcttcgcaacggctagtcaaatgtcctagttccaatgtgattggttgtccggcaagtcgtctctggctacgta

SEQ ID NO: 505 - DNA, 77 bp, Medicago truncatula
gagtgcagccaaggatgacttgccggtaatatatctaattccttggtttcttccggcaagttgttcttgactacatt

SEQ ID NO: 506 - DNA, 85 bp, Medicago truncatula; identical to SEQ ID NO: 501

SEQ ID NO: 507 - DNA, 240 bp, Medicago truncatula; identical to SEQ ID NO: 502

SEQ ID NO: 508 - DNA, 100 bp, Medicago truncatula
aaatggagccaaggatgacttgccggtatattagtttgtcgctaaagctaactagctttagttgttgggtactcccggcaggtcatccttcggctatatt

SEQ ID NO: 509 - DNA, 128 bp, Oryza sativa
gaacggaatgcagccaaggatgacttgccggtacgtgtatgcatgtttcaaggtactatatgtgcccccaactgttttagatccatgctgacattttccggcaagttgtccttggctacgtcttgttc

SEQ ID NO: 510 - DNA, 112 bp, Oryza sativa
gaacgggatgcagccaaggatgacttgccggctcctggtattgggggaatctcagctttgctgaagcgccttggagttagccggcaagtctgtccttggctacacctagctc

SEQ ID NO: 511 - DNA, 103 bp, Oryza sativa
atttatcgtgtagccaaggatgaattgccggcgtttcacgctgttgatggtgcgtgcatatataagttggcgccggcaagtcatttcaggctacatgtttgcc

SEQ ID NO: 512 - DNA, 132 bp, Oryza sativa
gctggttgtgtagccaaggatgacttgccggcctggtttgtgttcatcagcaatccagcatatgctgtattgccgtgtgtgatcgatcgatgcatggaccggcaagttattttctttggctacattacaacc

SEQ ID NO: 513 - DNA, 170 bp, Oryza sativa
gctgattcggtagccaaggatgacttgcctaatgcctatgtgcatgtgtttatacgctgctcatctgcattttgattatcccctgatcagtcctgtcgtcaattatatgtgtgtgtagtactctgtactcatacatatataggcatgtcttccttggctattcggagcgg

SEQ ID NO: 514 - DNA, 126 bp, Oryza sativa
ctgcctctggtagccaaggatgacttgcctattgtgctcttctgaatgatgcagtgccatgatcagtgtggcctggctggttcagatgagccgagataggcagtctccttggctagcctgagtggc

SEQ ID NO: 515 - DNA, 122 bp, Oryza sativa
ttagctctggtagccaaggatgacttgcctgtgtccttgtgtgtaaggatcattaattattattcagaaaatgatcctttcagcaggtttcatgggcagtctccttggctagcctgagtgat

SEQ ID NO: 516 - DNA, 108 bp, Oryza sativa
gtagctctggtagccaaggatgacttgcctgtgtccttgtgtagaggatcattcagaaaatgagccttgaactggttcataggcagtctccttggctagtctgagtcg

SEQ ID NO: 517 - DNA, 125 bp, Oryza sativa
tcgcatctggtagccaaggatgacttgcctgtgtctctgctcatgtgcagtagaagaagatgcatttctagctgctttctgcatatgtgatctcacaggcagtctccttggctagcctgagcggc

SEQ ID NO: 518 - DNA, 156 bp, Oryza sativa
tctgtctagatagccaaggatgacttgcctgtggcctcttggagagagaggtgtagcttaattagcagcatggtttgagcattgcttgatcggttgatcgcttcgcttgctctgcatgagatcttacaggcagtctccttggctagtctgggcggc

SEQ ID NO: 519 - DNA, 108 bp, Oryza sativa
ttatctctgatagccaaggatgacttgcctgtgtcctccctgaaggattagcaatttaatgatcctttaagctggttcatgggcagtctccttggctagcctgagtgg

SEQ ID NO: 520 - DNA, 138 bp, Oryza sativa
tgagtcctggtagccaaggatgacttgcctgtatatttatatatatatgtgtgtgtgatcaatggatggattgatcaagctgcttgcaggctcatgcatatatatgtacaggcagtctccttggctagcccggctacc

SEQ ID NO: 521 - DNA, 177 bp, Oryza sativa
ctccctttggtagccaagaatgacttgcctatgtgttttgccttgtgttggctcatccatccatctatcagccgttgcagatttgcagtggcagattaaagggtttcagaaagaaattcttgtgatggatgtgcaatgtggctgcatgggccggtcttcttggctagccagagtggc

SEQ ID NO: 522 - DNA, 173 bp, Oryza sativa
ctccctttggtagccaagaatgacttgcctacgcttttgccctctgttggctcatccatccgtctatctatctgccatggcagatggcagattaagggtttctgaaagaaattcttgtgataggatgtgcaatgaggctgcatgggccggtcttcttggctagccagagtggc

SEQ ID NO: 523 - DNA, 111 bp, Populus trichocarpa
gagtcgaatgcagccaaggatgacttgccggcatttcctcctaagtagcgagcccggcaaggcttctatttggcacgcccggccggcgggttgtccttggctatatttggt

SEQ ID NO: 524 - DNA, 166 bp, Populus trichocarpa
tatcgtggcgcagccaaggatgacttgccggcaagctcctcacacgtattttgtttcgagtttcattgatggcattgctagatagatatatatgatttcgtaattcaaacttttgggccattgtctggttgaaatgatcggcaagctgtccttggctatgtctcta

SEQ ID NO: 525 - DNA, 239 bp, Populus trichocarpa
ttatgtggtgcagccaaggatgacttgccggaataagctatgatcaatagctatagctatggtatttttcatcctaggtttggctatatatatatatatatatagccagttaattgctataaatctcagcacatttatgttttatatgtctgcacacagacacacacatcattgaatgttgatgttccacctcctatgatcagtagtcaatcggcaagtcatctctggctactcaactc

SEQ ID NO: 526 - DNA, 106 bp, Populus trichocarpa
gagtagaatgcagccaaggatgacttgccggcatttcctcctaggtagctagcaagccttctatttggcatgcctgtccggcaggttgtccttggctaaattttgt

SEQ ID NO: 527 - DNA, 118 bp, Populus trichocarpa
gagtgtaattcagccaaggatgacttgccggcagcacgggatctcagagcttaataactagaagatcaaggctgtcattacttttccggccggcaagttgcccttggctacattgtac

SEQ ID NO: 528 - DNA, 123 bp, Populus trichocarpa
tcttgtttggtagccaaggatgacttgcctgctccattgtaggaggtttccgaaaaaatgcagacatgtataatttcgaaacccctgtttcgtttcaggcagtctccttggctaacttgactg

SEQ ID NO: 529 - DNA, 137 bp, Populus trichocarpa
tcttgtttgatagccaaggatgacttgcctgctacttgcaagagtttctgcaaagagatcagaaccaaatatgcatggaattatatgtaatgaaactcttgtttgattgccaggcagtctccttggctagcctgaca

SEQ ID NO: 530 - DNA, 203 bp, Populus trichocarpa
tcttgtttggtagccaaggatgacttgcctgtagcctccctcggattcatgaacacgagcatttatgtggtgctcaaaagaaaaggagagaatgatcccagctggcagcgacaaggtcaatccattgaagtagcgagaagcaggtgatttatagctagaatccacaagaggttcccagcaagtgtccttggctaacgagacgg

SEQ ID NO: 531 - DNA, 143 bp, Populus trichocarpa
tcttgtttgatagccaaggatgacttgcctgctacatacaagagatcattatgcataaatagaacgaaatatgtacatggtattaattaatgcagtgaaaactcttgtttggttgccaggcagtctccttggctaagctgaca

SEQ ID NO: 532 - DNA, 119 bp, Populus trichocarpa
tcttgtttggtagccaaggatgacttgcctgctcccttcaaggaggtttcatgaaatgcagacatgatctctcgaaacccctgttgggtttcaggcggtctccttggctaacttgacag

SEQ ID NO: 533 - DNA, 104 bp, Populus trichocarpa
ccttgcgtggaagccaaggatgacttgcctgagaattttaggaaggtttctatatgaaagctttttattagttttgcaggaagtcaaccttggctttcctatag

SEQ ID NO: 534 - DNA, 104 bp, Populus trichocarpa; identical to SEQ ID NO: 533

SEQ ID NO: 535 - DNA, 115 bp, Populus trichocarpa
tcttgttagttagccaaggacgacttgcctgttcctagcaatttgggatttgccctggactaagaggcaggaccctcattccgggtttcaggcagtctccttggctaggttgaca

SEQ ID NO: 536 - DNA, 119 bp, Populus trichocarpa
gagggtttggtagccaaggatgacttgcctatttcctccataaggctttaaaaagcatgaaatgtggtttagagctcaattgaagggttcataggcagtctactttggttatcctagct

SEQ ID NO: 537 - DNA, 122 bp, Populus trichocarpa
gagggttgggtagccaaggacgacttgcctatttcctccatggggtcctgaaaagaatgaaatactgtcgttcagagctcattggtagggttcataggcagtctcctttggctatcctaact

SEQ ID NO: 538 - DNA, 110 bp, Populus trichocarpa
cgtgtttggtagccaaggatgacttgcccactccattgaaagagtttttcaagcatatggtagtgtagaacttttctttggttctgggcagtcatcttggctatgctgac

SEQ ID NO: 539 - DNA, 109 bp, Populus trichocarpa
cgtgtttggtagccaaggatgacttgcccactctatggaaagagttctcaagcacacggcagagaggacccttacttcggctctgggcagtcaccttggctatgctgac

SEQ ID NO: 540 - DNA, 118 bp, Populus trichocarpa
tgctgttttctagccaaggatgacttgctcgttagcccttgaaagatgtttcaaatttaggctgcatatgctcagaacctttttctggcttcaggcaatcatcttggctaaatgacag

SEQ ID NO: 541 - DNA, 123 bp, Populus trichocarpa
tcttgtttagtagccatggatgaattgcctgcttccaaaatgaggtgtcaagccgagataaacatacaagtttgatccctcattggggttcccaggcagtcatcagcttggctaacttgacag

SEQ ID NO: 542 - DNA, 118 bp, Populus trichocarpa
tagtagaatgcagccaagaatgatttgccggcgccggccagcacttgttgcaaagcaactaagcaagggcttcaaatgtttttggcaccccggcaagttgttcttggctacatttgga

SEQ ID NO: 543 - DNA, 92 bp, Ricinus communis
gaatacagccaaggatgacttgccggcatcaatttatatatatatatatatatatatatatttatcggcaagctgttcttggctatattcat

SEQ ID NO: 544 - DNA, 93 bp, Ricinus communis
taattcagccaaggatgacttgccggcacagcctatatatgtcttctactcacagctgctagctaccggcaagttgttcttggctacattgta

SEQ ID NO: 545 - DNA, 102 bp, Sorghum bicolor
cagccaaggatgacttgccggatatgtgcatgcatatgttacaaggcagcatatgcaccctgttacaagcctgcctgttctccggcaagttgtccttggcta

SEQ ID NO: 546 - DNA, 126 bp, Sorghum bicolor
tggcgagagcctgcctttggtagccaaggatgacttgcctacacggccttgcgagttccggttgcatggccagttcagttgggtttgtgggcggtcaccttggctagcctgagtggctcttgcctg

SEQ ID NO: 547 - DNA, 103 bp, Sorghum bicolor
tggcgagagcctgcctttggtagccaaggatgacttgcctacatggcattgcgagttccggttgcatggccagttcagctgagtttgtgggcggtcaccttgg

SEQ ID NO: 548 - DNA, 109 bp, Sorghum bicolor
tagccaaggatgacttgccggcatttcttgggtcggatgactgagttgttgagcctggggatgaacagacccggatcgacggccggccggcaagtcatctgtggctacg

SEQ ID NO: 549 - DNA, 148 bp, Sorghum bicolor
cgatgagagcactgctctggtagccaaggatgacttgcctgtggcctccactccacctgcggcaggaggctcttcttctgcgcgcgcgtgtgtgtgtggttgtcgatcgcaggcagtctccttggctagcctcagcggctctcatcct

SEQ ID NO: 550 - DNA, 152 bp, Sorghum bicolor
gcgataagagtctgcccagatagccaaggatgacttgcctgtggcctcttggcttggcttgagagcttattaactctgtgcacgtttaatttgctcttcttgtggcctcgatcacaggcagtctccttggctagtccgggcggctcttatct

SEQ ID NO: 551 - DNA, 98 bp, Sorghum bicolor
tagccaaggatgacttgcctagctatatgcctgagagcctgtctcttggtggtaaatttgtatgtgctgagcatataggcatgtcttccttggctact

SEQ ID NO: 552 - DNA, 169 bp, Sorghum bicolor
gatggagagcccccttttgctagccaagaatgacttgcctatgcatgccctctgttggcaattcctccagccatggagattgcacaaggtgaatttttgcggcatagatgatggatgcaatgtggctgcatgggcaggtcttcttggctagccagagtgctctcatcca

SEQ ID NO: 553 - DNA, 123 bp, Sorghum bicolor
tgtagccaaggatgacttgccggccgatcgatgcctcatccctgtccgggaacgtcatgcatgtgatgcaaactgtgaggccgcatcgtcgatcgaccggcaggttcttctctttggctacac

SEQ ID NO: 554 - DNA, 97 bp, Sorghum bicolor
cagccaaggatgacttgccggctcctcaaatttgaagcgtcgtctaagctgctgaggcttaataaaaacttagtcggcaagtctgtccttggctaca

SEQ ID NO: 555 - DNA, 97 bp, Sorghum bicolor
tgatagccaaggatgacttgcctgtgtcctttgtgccgaaggatcagaaatgtgagcctttgagatagatggttcataggcagtctccttggctagc

SEQ ID NO: 556 - DNA, 92 bp, Sorghum bicolor
tagccaaggatgacttgcctatatcctctctaaaggatcagcaaatattgaggcttctagtggtctcatatgggcagtctccttggctagcc

SEQ ID NO: 557 - DNA, 93 bp, Sorghum bicolor
ggtagccaaggatgacttgcctatatcctctatgaaggatcagcaaatatcgaggctttgagtggtctcatgggcagtctccttggctagcct

SEQ ID NO: 558 - DNA, 103 bp, Sorghum bicolor
atagccaaggatgatttgcctgtagcaacctctgagtgctcctgctgccatggcagtcaggagcgccaagtgggtgcttctccgggcaaatcatctgggctag

SEQ ID NO: 559 - DNA, 149 bp, Solanum lycopersicum
ggtctataaggtttgcatgaagttgaagagagtcaagttgcagccaaggatgacttgccggaccaaaagttgtgaccattttctagttccggcaagttgtttttggctataagtttgctctcttcttctcatgttatcctcgttagacc

SEQ ID NO: 560 - DNA, 205 bp, Solanum lycopersicum
ttttaatttggtttcaggcagtctccttggctaccttgacatgctcttttcttttatgcaagatatcttttcaaaatagaagttttagtcatcgttaaaatatcgagacggggttacaagtcttatttaaaagaagagaagtctagcatgatgagaagagtcttatttggtagccaaggatgacttgcctgcaccgtacttgaaa

SEQ ID NO: 561 - DNA, 176 bp, Solanum lycopersicum
gaagaggggttttatatgaagttgagagtattatttagtagccaaggatgacttgcctacttcatttgatatatagtttaaaataataatattgacaatatttgtcatttggtcgtaggcaagttatcctggctatcttgacatgctcgtaatttttcatgtaagaccttatcttc

SEQ ID NO: 562 - DNA, 146 bp, Saccharum ssp.
gtagccaaggatgacttgccggccgatgcttcgatggatccctcatccccgtccggccgggaacgtcgcacgtatgtatgtatgcgtgcatatgctgcgaactgtgaggcatccatatcgaccggcaggttcttctctttggctac

SEQ ID NO: 563 - DNA, 193 bp, Theobroma cacao
ggaaatgaggctatgtgctgcagccaaggatgacttgccggaaaagctatattttacattatattaccctgttccctgatattaactatatgcttctgtatcaattttaactataaattaataaaatttataataaatgttataagagtttatcggcaagtcgtctctggctatatcactgtttcattttctc

SEQ ID NO: 564 - DNA, 152 bp, Theobroma cacao
agattaagagtcttgttgggtagccaaggatgacttgcctatatccaaaaaggattttgaggaaagaaaagctgaatctgataaatctcatcagagtccttttaatggtttctgggcagtctcctttggctatcctgactggctcttatctt

SEQ ID NO: 565 - DNA, 141 bp, Theobroma cacao
aagaagagagcctcgctggaaagccaagaatgacttgcctgcttcctccttgaggtttcaaaatttcaatgaaacttttaaaacccgccattctggctcgcgggcagtcttcttcgctttcttgacaggctattcttttcc

SEQ ID NO: 566 - DNA, 144 bp, Theobroma cacao
gataaagagtctttgtttggtagccagggatgacttgcctacggcttttcaggtggttaatattgatgctatgattatgaatgtaaaacccctggctctggtctgcaggcagtcaccttggctatgctaacaggctcttttctc

SEQ ID NO: 567 - DNA, 139 bp, Theobroma cacao
aggtaaagagtcatgcttggtagccaaggatgacttgcctgcacctttccccaaggattcaagtaaatggctaagaaacctgaaactcctttcaggttgccaggcagtcacctaggctaatctagcaggttcttttccc

SEQ ID NO: 568 - DNA, 115 bp, Theobroma cacao
aagataagagttctgtttggtagccaaggatgagttgcctgctccttccaagaggtttcaaatcttgttgggttgccaggcattcaccttggctaacttgactggctcttttctt

SEQ ID NO: 569 - DNA, 141 bp, Theobroma cacao
agataaagagtcttgtttgatagccaaggatgacttgcctgtacctcacagcaggtttctcttaggttaaaagttcttccttggaagcccctgtctagtttcaggcaattatccttggctaacctgacaggctcttctcta

SEQ ID NO: 570 - DNA, 132 bp, Theobroma cacao
aagaggtagacagtgtggtgcagccaaggatgacttgccggctaatccctaggaggcatgcatttgccttgtttctctgctttagattattccggctagttgtccttggctacggtgcgctgtcttcttctc

SEQ ID NO: 571 - DNA, 122 bp, Theobroma cacao
gagaggtagagaatttagtgcagccaaggatgacttgccggcgtagacaatactcaaatactaattattattgtatttttccggcaagtctgtccttggctacattggtttctcttcttctc

SEQ ID NO: 572 - DNA, 124 bp, Vitis vinifera
gagagtggaatgcagccaaggatgacttgccggaatttatatatagtgagaagagaagaggctatatgctttcacatatatagtgaaccctggcaagttgtccttggctacatttgattctctt

SEQ ID NO: 573 - DNA, 90 bp, Vitis vinifera
gggagtagaatgcagccaaggatgacttgccggagatggggcattcctcgttaatccggcaagttgtccttggctacattgggctctctt

SEQ ID NO: 574 - DNA, 120 bp, Vitis vinifera
gagtggaatgcagccaagaatgatttgccggaatttatatatagtgagaagagaagaggctataggctttcacatatatagtgaaccctggcaagttgtccttggctacatttgattctc

SEQ ID NO: 575 - DNA, 149 bp, Vitis vinifera
gtcttgtctgatagccaaggatgacttgcctgccctatcccaagtgggtcaatttctttcttttttccaagtagtgtttgatatttgatatatcatgaatccggttgtttgggttccaggcagtcaccttggctaattttacaggctct

SEQ ID NO: 576 - DNA, 122 bp, Vitis vinifera
gagagtggagtgcagccaaggatgacttgccggaattcacatatagagtggaatgaggcaatagaccggcctcttctcatggtgtccctggcaggttgtccttggctacctttcgctctctt

SEQ ID NO: 577 - DNA, 122 bp, Vitis vinifera
gagagtggagtgcagccaaggatgacttgccggaattcacatatagagtggaatgaggcaagaggccggcctcttcccatggtgtccctggcaggttgtccttggctacctttcgttctctt

SEQ ID NO: 578 - DNA, 102 bp, Vitis vinifera
agagtggaagtgagccaaggatgacttgccggcagctgcagcaaggcattaaggtttaactggccataactggcaagcatccgaggctctgtttcaccctct

SEQ ID NO: 579 - DNA, 101 bp, Vitis vinifera
tgagtggaatagagccaaggatgacttgccggcaactgcagcaaggcatagggtttaactggtcataactggcaagcatctgaggctctatttcaccctct

SEQ ID NO: 580 - DNA, 102 bp, Vitis vinifera
agtgtggaattgagccaaggatgacttgccggcagctgcagcaaggcattaaggtttaactggctataactggcaagcatccgaggctctgtttcaccctct

SEQ ID NO: 581 - DNA, 97 bp, Vitis vinifera
agggtggaatagagccaaggatgacttgccggcatttgcagtaagtctatattaactggaacagccggcatgtaatcctggctctatttggtcctct

SEQ ID NO: 582 - DNA, 99 bp, Vitis vinifera
gaaagtggattgcagccaaggatgacttgccggcacttggcattaggcaccatcgatcatcttcccggcaagttgttcctggctacattctgctctctt

SEQ ID NO: 583 - DNA, 96 bp, Vitis vinifera
agggaggaacaaagccaaggatgaattgccggcgatgaaagtaggcagctttgtccatggatcggcaatttatttcttggctatgttgggctctct

SEQ ID NO: 584 - DNA, 143 bp, Vitis vinifera
ggttatgtggtgcagccaaggatgacttgccggcaactccctttattgtactcatgcatgctcatacttatactgttgtgggcatcatttaagtggcaaaaatggtggtcggcgagtcattcttagctacatttctgcctcat

SEQ ID NO: 585 - DNA, 125 bp, Vitis vinifera
gtctcgtctggtagccaaggatgacttgcctaaatccaccaggtttcaaaacactgaatgtaattatccacaaagcgattccgtggtctttaggcagtcattccttcggctaaactgaccggctc

SEQ ID NO: 586 - DNA, 248 bp, Vitis vinifera
cgttgtttggtagcgaaggatgacttgcctacagcctccttaaggtttcaaaataccgagcttgtctacctttgatcaaatgattcaagaaacaaaagaaaagaaaggccatggcagccatccatcagagtcaacatgagaatcatgttctatagaaattggagtcattcttgagaatgaacacgacactattagcttggaatctataatgtggtttatggcaagtctccttggcacctgatggcctc

SEQ ID NO: 587 - DNA, 134 bp, Zea mays
atgaggtagagaacgggatgcagccaaggatgacttgccggctcctggaacctggaggcgtctcagcttgctgtgctgtggcttagaacttagtcggcaagtctgtccttggctacacctagttctcttcctct

SEQ ID NO: 588 - DNA, 150 bp, Zea mays
accagagctgattcgttcagtagccaaggatgacttgcctaggtatatatgcatgggctatggctacatgcctgagagccagtctcttgtgacgctgagcatgtatagtgtaggcatgtcttccttggctactcggagcggctctagtca

SEQ ID NO: 589 - DNA, 140 bp, Zea mays
cagagctagcctgcctctggtagccaaggatgacttgcctacatggtctcgctagttccggttgttgcatgcatgccactatgccagtcctgctgggtttgtgggcggtctccttggctagcctgagtggctcttgcctg

SEQ ID NO: 590 - DNA, 128 bp, Zea mays
caataagggcctgcctctgatagccaaggatgacttgcctatgtcctttgtttacaaaggatcagaattgtggacctttgtgttggttcgtaggcagtctccttggctagcctgagtggcccctattg

SEQ ID NO: 591 - DNA, 191 bp, Zea mays
gatgagagtggtagctctggtagccaaggatgacttgcctgtgtgctggccacgctcccctcatgcaaggaccatctcgtgtcgaccgacgagcgagcgagcgatcgatcgatgagaggatgacgaagcttggggtgtacgttggtctctcacgggcagtctccttggctagccctgactcactcttaccg

SEQ ID NO: 592 - DNA, 151 bp, Zea mays
gcgataagagtctgtccagatagccaaggatgacttgcctgtggcttcttggcttggcttggctcgggcaaaaccttgtgcacgttttattgctcgcctcgtggcctcgatcacaggcagtctccttggctagtccgggcgggccccttat

SEQ ID NO: 593 - DNA, 133 bp, Zea mays
cgatgagagcactgctctggtagccaaggatgacttgcctgtggcctccatcagtcgcagaggacgctgttcttctgcttgtggttgtcgatcgcaggcagtctccttggctagcccgagcggctctcatcca

SEQ ID NO: 594 - DNA, 138 bp, Zea mays
gtagccaagaatgacttgcctatgcacgccctctgttggcagttccgtccggcagccatggcgacggttgcacaaggtgagtttttgcggcgtggatgatgcaatgtggctgcatcggcaggtcttcttggctagcca

SEQ ID NO: 595 - DNA, 65 bp, Zea mays
gtagccaaggatgacttgccggcattatatttcttggcccgccggcaagtcatctggggctacgc

SEQ ID NO: 596 - DNA, 126 bp, Zea mays
gcagccaaggatgacttgccgggtattttgagcatgcatgttacaggggagcatatgcaatctgtttggaattttgagcccataccgtgcggtgcctgtcttccggcaagttgtccttggctacat

SEQ ID NO: 597 - DNA, 149 bp, Arabidopsis lyrata
ggagccacggtcgctgtttgctgctgtggcatcatcaagattcacatctgttgatggacggtggtgattcgctctccccaaagttctctatgaaaatgagaatcttgatgatgctgcatcggcaatcaacggctattctttttctctcc

SEQ ID NO: 598 - DNA, 146 bp, Arabidopsis lyrata
tagctcatctgtcgttgtttgtaggtgcagcaccatcaagattcacatgaaaattgataaatctcctaaattagggttttgatatgtatatgagaatcttgatgatgctgcatcaacaatcgacggctacaaaatacctaaagctg

SEQ ID NO: 599 - DNA, 133 bp, Arabidopsis lyrata
agctactgttcgctgttggagcatcatcaagattcacaaatcatcaagtattcgtgtaaatgaacccatttataattatattgttgatgtatgtatgagaatcttgatgatgctgcagctgcaatcagtggct

SEQ ID NO: 600 - DNA, 163 bp, Arabidopsis lyrata
gattcagaatttgaagttagtggcagtcattgtttgctattgcaacatcttcaagattcagaaatcagattcttttatgggttttcttttgagcctatattatttggtttgagaatcttgatgatgctgcagcggcaattaaatggcttatttatctagggtt

SEQ ID NO: 601 - DNA, 133 bp, Arabidopsis lyrata
gccagtagtcgcagatgcagcaccattaagattcacaagagatgtggttccctttgtttttgcctctcgatccgaagaaaagggttcctttcgagtgggaatcttgatgatgctgcatcagcaaatacatggc

SEQ ID NO: 602 - DNA, 135 bp, Aquilegia caerulea
gttggctctttggagacgcagcatcatctagttcgcacatgatgatgataggcagtgattaagtcactcacttacgcatgatagaagttgtgatatgagaatcttgatgatgctgcatcagcagttaggcgacta

SEQ ID NO: 603 - DNA, 108 bp, Aquilegia caerulea
gtgcagcatcattaagattcacaaaccctaagagccttatgatgggttttgatattgatcactcttataggactttatagagatgggaatcttgatgatgctgcatcg

SEQ ID NO: 604 - DNA, 54 bp, Aegilops speltoides
aggatcttgatgatgctgcagagaaggctgtaaaagcatcagtcaaatgattaa

SEQ ID NO: 605 - DNA, 277 bp, Aegilops tauschii
ttctttcagtgatgatagcgaagggttgatatatgttgatggttgatggtgggtgtttgcgagcgtggtatcatcaagattcacatccatcatgcatctccctctctctctctctctctctctctctctctctctctctctaggtctatatggggctatatggagctggagacatatagatgcatagatagataacatactttggatgagaatcttgatgatgctgcatccgcacacaagcgcccatcactatattccccgctgattgctgattgat

SEQ ID NO: 606 - DNA, 102 bp, Arabidopsis thaliana
tgctgtggcatcatcaagattcacatctgttgatggacggtggtgattcactctccacaaagttctctatgaaaatgagaatcttgatgatgctgcatcggc

SEQ ID NO: 607 - DNA, 95 bp, Arabidopsis thaliana
aggcgcagcaccattaagattcacatggaaattgataaataccctaaattagggttttgatatgtatatgagaatcttgatgatgctgcatcaac

SEQ ID NO: 608 - DNA, 133 bp, Arabidopsis thaliana
agctactgttcgctgttggagcatcatcaagattcacaaatcatcaagtattcgtgtaaataaacccatttatgattagatttttgatgtatgtatgagaatcttgatgatgctgcagctgcaatcagtggct

SEQ ID NO: 609 - DNA, 124 bp, Arabidopsis thaliana
agtcattgtttgctattgcaacatcttcaagattcagaaatcagattctcttatgggttttcttttgagcctttattttttggtttgagaatcttgatgatgctgcagcggcaattaaatggct

SEQ ID NO: 610 - DNA, 125 bp, Arabidopsis thaliana
gtagtcgcagatgcagcaccattaagattcacaagagatgtggttccctttgctttcgcctctcgatccgcagaaaagggttccttatcgagtgggaatcttgatgatgctgcatcagcaaatac

SEQ ID NO: 611 - DNA, 141 bp, Arabidopsis thaliana
agaatcctgatgatgctgcagcatttgtcaacacttggttcgtcgaggcccgaccatcaaaccggtggttctcagccgccggaaacagtgagaatccgcctccgctaccaatgttgctgctgcccggaaattggtggtttg

SEQ ID NO: 612 - DNA, 153 bp, Brachypodium distachyon
aggcggcacgcacagtcggcgcttgcaggtgcagcaccaccaagattcacatcgggttctccagtcgtaattaattaacgaggagtacaaccatgatgagaatcttgatgatgctgcatcggcaaccgctcgactactcatcatatcgtcaat

SEQ ID NO: 613 - DNA, 254 bp, Brachypodium distachyon
gttcgcggcgaccagtcggtgatttctgctgtggcatcatcaagattcacacaaatgcatgctagcttcgtctatgccatcctttctcatctttcgatctcgatctcggccctaattaagtaattatacccaattgtggatcggccggattggagatcgatggatgcgtggagaggagctagattagctatagcttatgtgtgggaatcttgatgatgctgcatcggacatcagtgactaaaacaagtatggca

SEQ ID NO: 614 - DNA, 93 bp, Brachypodium distachyon
tggagccatcgggtcaaaccggaatgaggccggtgtggcggcgggggcagctgtcgtggtggcagttttggagaatcctgatgatgctgcagc

SEQ ID NO: 615 - DNA, 119 bp, Brassica oleracea
cgttttttgtaggcgcagcaccatcaagattcacatggaaattgaaaaatctcctaatttttaattagggttttgatatgtatatgagaatcttgatgatgctgcatcaacaaccgacg

SEQ ID NO: 616 - DNA, 107 bp, Brassica oleracea
tgtaggtgcagcaccattaagattcacatggaaattgagaaaaccctaatttatattaattagggttctgatatgtatatgagaatcttgatgatgctgcatcaaca

SEQ ID NO: 617 - DNA, 119 bp, Brassica rapa; identical to SEQ ID NO: 615

SEQ ID NO: 618 - DNA, 107 bp, Brassica rapa; identical to SEQ ID NO: 616

SEQ ID NO: 619 - DNA, 162 bp, Citrus sinensis
gtcaccttaaaacagtcgttgctcgctgtagcagcgtcctcaagattcacatccagtctaaaggcaaaagcagcaatttttcttcatttttgcttgccttggtttttgtcagtgagaatcttgatgatgctgcaacggcgattaatgactagctaccaacaa

SEQ ID NO: 620 - DNA, 162 bp, Citrus sinensis; identical to SEQ ID NO: 619

SEQ ID NO: 621 - DNA, 127 bp, Citrus sinensis
ttgctcgctgtagcagcgacgtcaagattcacatccagtctaaaggcaaaagcagcaatttttcttcagtttggcttgcctgggtttttgtcagtgagaatcttgatgatgcggcaacggcgatgaa

SEQ ID NO: 622 - DNA, 163 bp, Citrus sinensis
actgtttgcagttggagcaccatcaagattcacaaactattagggttagtgagtggagataatggtggctattttattttttttggccccttgcttcacttcaaattgctctttgttttggaatcttgatgatgctgcagcagcgataagtggctaaattata

SEQ ID NO: 623 - DNA, 125 bp, Gossypium hirsutum
agtcactgtttgctgttggagcatcatcaagattcacaattttagggttcttttttgattgatttgatcaatcagcctttttatgattgagaatcctgatgatgctgcagtggcaataagtggct

SEQ ID NO: 624 - DNA, 159 bp, Glycine max
ttaacagtcgttatttgcggatgtagcatcatcaagattcacatgcaagcgcaggtggtgggtgggacttgatgcaatctaagtgctgtgccagccaagccataggtcttttggaactgagaatcttgatgatgctgcatcagccataaacgacttcac

SEQ ID NO: 625 - DNA, 153 bp, Glycine max
ttgacagtcgttgtttgcggatgtagcatcatcaagattcacatgcaaatgaaggtgggtgggactatgatgcaatccaagtgctctgccaatccatcggtctttttgatgtgagaatcttgatgatgctgcatcagccataaacggctttaa

SEQ ID NO: 626 - DNA, 153 bp, Glycine max
aaatcagtcactgtttgccggtggagcatcatcaagattcacaagctttaggggcattaatttgtttgaggtggttccttattgctccaaaaccaattagcccttttgctatgggaatcttgatgatgctgcagcagcaataaatgactaata

SEQ ID NO: 627 - DNA, 150 bp, Glycine max
aaaacagtcgctgattgcagatggagcatcatcaagattcacaagcttcaggggttttttgtttggggtggtcccttattgctcccaaatgaattaagccctttgatatgggaatcttgatgatgctgcagcagcaataaacgactaaca

SEQ ID NO: 628 - DNA, 153 bp, Glycine max
aaaacagtcactgtttgccggtggagcatcatcaagattcacaagctttagggggcattaatttgtttgaggtggtcccttattgatccaaaccaattagcccttttgctatgggaatcttgatgatgctgcagcagcaataaatgactaata

SEQ ID NO: 629 - DNA, 133 bp, Glycine max
gcggatgtagcatcatcaagattcacatgcaaacgcaggtggtgggtgggactgtgatgcaatctaagtgctactgtgccaaccaaagccataggtcttttggaagtgagaatcttgatgatgctgcatcagc

SEQ ID NO: 630 - DNA, 148 bp, Gossypium raimondii
agaatcttgatgatgctgcatgagagaacagtggcattagtgtagtactgacctgaccgtgcatttgccacggccaatcagggacacgttgtggaggatcgaattcaaccggtttcaccattgttctttcctcactaggaaagaatct

SEQ ID NO: 631 - DNA, 240 bp, Gossypium raimondii
aaaatcttgatgatgctgcatgaaaaaacagtggcattagtgtagtactgacctgaccgtgcatttgccacggccaatcagggacacgttgtggaggatcgaattcaaccggtttcaccattgttctttcctcactaggaaaaaatctcggatatgcactattccaaaaaataggctgatctgaagtccccgctaacccttggaaagatggaacactaaatgttgcagctgcagggttct

SEQ ID NO: 632 - DNA, 255 bp, Hordeum vulgare
atacagtcatgaatccaatccactacatgaaaccgccccggcgcaagtccgaaaacgctgaaacgccggaggagcaaaaaagatactggcttcccagaacatttacagtatggcttctttttcagcgggggtggtggtggtggtgttggttgcttgacgacgatgatggagccatcgggtcgaaccggaatgaggccgatggggcggcgggggcagctgccgcggctgttttggagaatcctgatgatgctgcag

SEQ ID NO: 633 - DNA, 90 bp, Hordeum vulgare
atggagccatcgggtcgaaccggaatgaggccgatggggcggcgggggcagctgccgcggctgttttggagaatcctgatgatgctgcag

SEQ ID NO: 634 - DNA, 137 bp, Hordeum vulgare
tggtggtggtgttggttgcttgacgacgatgatggagccatcgggtcgaaccggaatgaggccgatggggcggcgggggcagctgccgcggctgttttggagaatcctgatgatgctgcagcggacgatgaccacca

SEQ ID NO: 635 - DNA, 272 bp, Hordeum vulgare
cttgggcagcatgggaaatacagtcatgaatccaatccactacatgaaaccgccccggcgcaagaccgaaaacgctgaaacgccggaggagcaaaaaagatactggcttcccagaacatttacagtatggcttctttttcagcgggggtggtggtggtggtgttggttgcttgacgacgatgatggagccatcgggtcgaaccggaatgaggccgatggggcggcgggggcagctgccgcggctgttttggagaatcctgatgatgctgcag

SEQ ID NO: 636 - DNA, 146 bp, Manihot esculenta
attggcggatgcgtcaccatcaagattcacaaaactatgaaggcttcatcgggacggtgagtgtacggccggcggcggtggctcttcttacttaaaaggtttcctttttcgtatgagaatcttgatgatgctgcatcggcaaatat

SEQ ID NO: 637 - DNA, 113 bp, Medicago truncatula
gccggtggagcatcatcaggattcacaagattttgaagggtttaatttgttttgattgtttcaaatagattagccctttgacatatgagaatcctgatgatgctgcagctgca

SEQ ID NO: 638 - DNA, 45 bp, Medicago truncatula
atgcagaatctctgagaattgtgaggaatcttgatgattctgcac

SEQ ID NO: 639 - DNA, 109 bp, Oryza sativa
gtgtttgcgggcgtggcatcatcaagattcacatccatgcatatatcacaagacgcacatatacatccgatttggctgagaatcttgatgatgctgcatccgcagacaa

SEQ ID NO: 640 - DNA, 238 bp, Oryza sativa
gtgatttctgacgtggcatcatcaagattcacacattacattgcatgcatgcatatgtctatgcatctttgagcttgttgttctgatctcaacaacctagctagctaatatttctctcctggccctgacctgcatgatgcatggttgcacgcatggagagagaagagagagatcgaagctaattaaacgcatgtgtatatatgtgtgggaatcttgatgatgctgcatcggaaattaa

SEQ ID NO: 641 - DNA, 111 bp, Oryza sativa
cttgttgcgggtgcagcgtcatcaagattcacgtgtgccgcacggcacacgtatcggttttcaagtgtagtcatcgtgcgtgaatcttgatgatgctgcaccagcaaagag

SEQ ID NO: 642 - DNA, 130 bp, Oryza sativa
aaacagtcggtgcttgcaggtgcagcaccatcaagattcacatcgagttcatccctaaacgagatcgaggttggctgactatatgtgatgagaatcttgatgatgctgcatcagcaaacgctcgactact

SEQ ID NO: 643 - DNA, 297 bp, Oryza sativa
atgcaaatacagtcatgaatcccaattaattaatcactacaagaaaccacccggccggcccgccggcgcaaagacgaaaacgttgaaacgccggcgacggccaagaaaaaaaaatttgccggcttcccggcaaaatttacagtggtggtgatggcttctttcctttttatcaatggtggtggtgatggcggcttgacgacgaagacgacggcgccgtcgggtcgaaccggagggtggcagtgtgttaggcagcagctgctgtcgtggcggctttggagaatcctgatgatgctgcag

SEQ ID NO: 644 - DNA, 62 bp, Oryza sativa
ggcagtgtgttaggcagcagctgctgtcgtggcggctttggagaatcctgatgatgctgcag

SEQ ID NO: 645 - DNA, 53 bp, Oryza sativa
agaatcctgatgatgctgcagcggaggacgacgacggcgacgacgaggaggag

SEQ ID NO: 646 - DNA, 318 bp, Oryza sativa
ggtagcacggtcacgattcgtggtttcgcactcaaaaatgaagataaaagaatcatgagcgtgagaattctgatcataaccaggtggaacatagagagggatatcatatggagaaggtccctctctggacaaacgacgaatgttatcagcaagcggcggtggatgcacggtgaggtgtcgcctccaccagaataggtggcagtcaggcggtcggggggaagtagaactggtggtggccgggaaatggatgggggcgggaggaaggcgagcgggcggcgtcggcgacggtgcccgtagagaatcctgatgatgctgcag

SEQ ID NO: 647 - DNA, 248 bp, Picea glauca
gcttatgcaagacgaggcttccaacttgtcacgtgaagatcaacctagtgacaagttcaatgagtggtcactgggttttttcccgtaagtgttaatcaaagctggtgctgttgctgaatgcaaaatattctttgtctgcattaatgcaggctggaacaagaaatgaaatccccttttctgcagccattctggagaaggactagttgttgaagaatatatttggggtgagaatcctgatgatgctgcac

SEQ ID NO: 648 - DNA, 139 bp, Populus trichocarpa x Populus deltoides
gtttgcgggtggagcatcatcaagattcacatgcaaatgcacggccggtgatgttaagagttaaatctttctttgtttctgttcatctgccaaagttctttggaagtgagaatcttgatgatgctgcatcggcaataaa

SEQ ID NO: 649 - DNA, 139 bp, Populus trichocarpa x Populus deltoides
tattgccgatgcagcatcatcaagattctcacttccaaagaactttggcagatgaacagaaacaaagaaagatttaactcttaacatcaccggccgtgcatttgcatgtgaatcttgatgatgctccacccgcaaacaa

SEQ ID NO: 650 - DNA, 68 bp, Picea sitchensis
ctgtagccaatcatgtgaaggaacagcagctgaaattatttggggtgagaatcctgatgatgctgcac

SEQ ID NO: 651 - DNA, 129 bp, Populus trichocarpa
ttgtttgcaggtgcagcatcatcaagattcacattcaaatagatgtaccgaagctatacagctatgtagctagctagcaatgtataatcattgtaggtgagaatcttgatgatgctgcatcagccataa

SEQ ID NO: 652 - DNA, 140 bp, Populus trichocarpa
ttgtttgcgggtggagcatcatcaagattcacatgcaaatgcacggccggtgatgttaagagttaaatctttctttgtttctgttcatctgccaaagttctttggaagtgagaatcttgatgatgctgcatcggcaataa

SEQ ID NO: 653 - DNA, 128 bp, Populus trichocarpa
ttgtttgcaggtgcagcatcatcaagattcacattcaaacagatgtacggcagctagctagctagatagatagacagcaatgtatttctttgaaggtgagaatcttgatgatgctgcatcagccataa

SEQ ID NO: 654 - DNA, 182 bp, Populus trichocarpa
gcattggcggatgcggcatcatcaagattcacaagctttaaggcttgagtgagaggggtggcatacggtcacctcctttagcaagctttaaggcttgagtgagaggggtggcatacggtcacctcctttagtccaaagggtccttttttatgggaatcttgatgatgctgcatcggcaaata

SEQ ID NO: 655 - DNA, 133 bp, Populus trichocarpa
atattggccgatgcggcagcatcaagattcacaaactttaaggcttgagttggggtggtacacggtcacctcctttactcgaaaggttccttaatttctgatgggaatcttgatgatgctgcatcggcaaata

SEQ ID NO: 656 - DNA, 161 bp, Populus trichocarpa
ttgtttgcgggtgctgcatcaccaagattcacatgcaaatgcatggccgatgatatatgttagaaattttttttatataaaaaagatatctttctttctttctgatcatctgccaaagttctttggaagtgagaatcttgatgatgctgcatcggcaataa

SEQ ID NO: 657 - DNA, 143 bp, Populus trichocarpa
ctgtttgcctatggagcatcatcaagattcacaagctttattagggctagtgtgtggtgatgatggtggcttttggtggtccctttttttcaatccaatagccctttgaattgggaatcttgatgatgctgcagcggcaataa

SEQ ID NO: 658 - DNA, 143 bp, Populus trichocarpa
ctgtttgccgatggagcaccatcaagattcacaaactttattagggctaataagtggtgatgatggtggcttttggtggtcccttcgtttcaacccaatagccatttgaattgggaatcttgatgatgctgcagcggcaataa

SEQ ID NO: 659 - DNA, 125 bp, Populus trichocarpa
atgtggtgaaggcagcaagtcgcgggttgttgttggcgaaatggttctgttggttgaatggaagagtagctgaaggaacagttttggtcgaagaagagaatcctgatgatgctgcaacacagagc

SEQ ID NO: 660 - DNA, 144 bp, Ricinus communis
ctgatggagcatcatcaagattcacaaactttatctagggctagtgggttgttgtggtcccttttctttttctttttttctttttctcttgcttcaatccaatagtccctttgatatgggaatcttgatgatgctgcagcggca

SEQ ID NO: 661 - DNA, 102 bp, Sorghum bicolor
gtgcagcatcatcaagattcacatccagctcatcctcggtgatatgctatatacataaatatatgcgtatgtgatgagatgagaatcttgatgatgctgcat

SEQ ID NO: 662 - DNA, 170 bp, Sorghum bicolor
gcgtggcatcatcaagattcacacactgcttgcaaatgcatacatgcatctctgccgccttctttgcctgccattaatagcagttttactacatgttttagctgctgctgcatcatatatgcctctgtgaatatatatgtgtatgtgtgggaatcttgatgatgctgcat

SEQ ID NO: 663 - DNA, 119 bp, Sorghum bicolor
gtgcagcaccatcaagattcacatggtccaactcatgcatcttcagtgatgctcatgtgatggctcgcagttgctatatatgcatatgtgatgagatgagaatcttgatgatgctgcat

SEQ ID NO: 664 - DNA, 88 bp, Sorghum bicolor
tggcatcatcaagattcacaacccatggatccaaataaaccactgatttggatcgaggagatgcatgagaatcttgatgatgctgcat

SEQ ID NO: 665 - DNA, 115 bp, Sorghum bicolor
tcggagccgactctctgcaggtgcagcagcatcaaggttcgccagcagcaagcgatcgatcgaggcgtgtgtgtgtgaatcttgatgatgctgcaccagcaatgagccggccggc

SEQ ID NO: 666 - DNA, 118 bp, Sorghum bicolor
gcggcatcatcaggattcacaccgggtaaacaccgttgggtgggtgcagttacccatgcacatatatgcaggtctggctctatctgttgcttgcgtgagaatcctgatgatgctgcac

SEQ ID NO: 667 - DNA, 106 bp, Solanum lycopersicum
atgtggcataatcaagattcacgtgaaaagttgcaaattggttatataattgatgaaattaatggctggctatttgaaactcacgagaatcttgatgatgctgcat

SEQ ID NO: 668 - DNA, 135 bp, Solanum lycopersicum
atgtagcatcatcaagattcatacatgaaaattaagaggcaaggttaaatatgtagctttaatttgaaatgaaaaatataatatatcatgaccatgtctatttatttcaaagtgagaatcttgatgatgctgcat

SEQ ID NO: 669 - DNA, 300 bp, Saccharum officinarum
aagcgttgcatctccggtttctcaccaaccattattacccccaaccaagaagcgtctgtaccgaaccacacccaccggtggcggcgcatggccagcccgccaccatttcaccgttcagctcagacgccgtctccactctccagctcaacaggaggactgggggagtctgtcaggcggttggggggaagcggagctgctggtagccgaagaacacttgccgggggccaccggacggcacgctgccggcggctgtggccgcgtccacgccggtggcggtagagaatcctgatgatgctgcag

SEQ ID NO: 670 - DNA, 93 bp, Solanum tuberosum
gtgcagcaccatcaagattcacatagaaaatatggactatgaaatgaaatatgcccaatttttgaatacatgagaatcttgatgatgctgcat

SEQ ID NO: 671 - DNA, 100 bp, Triticum aestivum
agaatcctgatgatgctgcagcggacgacggcagggcggcaggaggaggagctgctgctgccacctgccatgcccagctgggaacagcccctgcaggcct

SEQ ID NO: 672 - DNA, 118 bp, Triticum aestivum
agaatcctgatgatgctgcagcggatgacgatgacgaagagaacagcggcaatggcagggtgtgaggaggagctgctgtcaccttccatgcccagctaggagcacccccctcaggcct

SEQ ID NO: 673 - DNA, 54 bp, Triticum aestivum; identical to SEQ ID NO: 604

SEQ ID NO: 674 - DNA, 240 bp, Theobroma cacao
  misc_feature (28)..(28): n is a, c, g, or t
agaatcctgatgatgctgcagtagagancagtggcattggtgtaacactgacctgaccatgcgtttgccatgcccaatcggggagaccttgcggaggacctaattcaactcgattcaccattgctctttcctcgctaggaaagaatctaggatatccactattccaaaaaataggctgatctgacggccctactggtcctttgaaaggtggaccacccactgttgcagcagcagggttct

SEQ ID NO: 675 - DNA, 154 bp, Theobroma cacao
acagtcactgtttgctgatggagcatcatcaagattcacaaaactttttttagggctaatgatcaatggtgaagatcatgcttcactatacaatcagccctttgaatatgtatgggaatcttgatgatgctgcagcggcaataaatggctaaat

SEQ ID NO: 676 - DNA, 160 bp, Theobroma cacao
atcagtcgttttttgctgctgcagcattatcaagattcatatgcaaatatagtacggcagccgtggtcccggtaccgcgattgttttttttcagatgccatagcttttatttgagcatgagaatcttgatgatgctgcatcggccataaatgacttcaca

SEQ ID NO: 677 - DNA, 163 bp, Theobroma cacao
caatctgtcagtgtttgcagatgcggcatcatcaagattcacaaactttagtaagggcttcttttggaggccggggagtggtaaccaatcacctcctttactcgaaagttacctttcaaatgggaatcttgatgatgctgcatcagcaaacatattggctatt

SEQ ID NO: 678 - DNA, 129 bp, Theobroma cacao
ggagcagtcgttgtttgcaaatgtggcatcatcaagattcacatgcaacgtacatatatatttatatatattatatggttttggcctgagaatcctgatgatgctgcattggcaatgaatggctagatg

SEQ ID NO: 679 - DNA, 189 bp, Theobroma cacao
ttgacagtcgttgtttgcgggtgtagcatcatcaagattcacatgcaaatgcacggtggtggtgatggataatacaaactctcttctttttttctccccttcccctttcttttcccttctcctttatgccaaagttgtttggaaagtgagaatcttgatgatgctgcatcggcaataaacgactataca

SEQ ID NO: 680 - DNA, 110 bp, Vitis vinifera
tattgccgatgcagcatcatcaagattctcatccttgaaaagtttggcagagataacatcaccaccgtgcatttgcatgtgaatcttgatgatgctacatgcgcaaacaa

SEQ ID NO: 681 - DNA, 118 bp, Vitis vinifera
tattgccgatgcagcatcatcaagattctcaaccccaaaacttgaggcagcgaagatggcatcgctgccgcgccgggctttcgcatgtgaatcttgatgatgctacacctgcaaacaa

SEQ ID NO: 682 - DNA, 138 bp, Vitis vinifera
gtttgcggatggagcatcatcaagattcacaagtattgagactcagtgcgtggtggtgatggtgacttttgtggtcccttcctacactccgatggctctttgatgtgggaatcttgatgatgctgcagcggcaataaa

SEQ ID NO: 683 - DNA, 109 bp, Vitis vinifera
gttagctgatgcagcatcatcaagattcacacccaatggaagggcagtgatgcaatctctgccaaagattttgagatgagaatcttgatgatgctgcattcgcagtgaa

SEQ ID NO: 684 - DNA, 83 bp, Zea mays
gcgtggcatcatcaagattcacaacccatcaatccgaaccactgatttggaatgcatgyatgagaatcttgatgatgctgcat

SEQ ID NO: 685 - DNA, 126 bp, Zea mays
gtgcagcaccatcaagattcacatcgtccaactcatgcatcatgcatatatgcatcttcaatgatgcgtgcctcgcatgtgtgtgtatatatatatgatgagatgagaatcttgatgatgctgcat

SEQ ID NO: 686 - DNA, 123 bp, Zea mays
gtgcagcaccaccaagattcacatccaactctcacgcatcttcagtgatgcatgcatgctctgtgatgtctcgcagcagctatatgcatatgtgatgagatgagaatcttgatgatgctgcat

SEQ ID NO: 687 - DNA, 74 bp, Zea mays
gtgcagcaccatcaagattcacatccccagctcgatctgtgcatgatgagatgagaatcttgatgatgctgcat

SEQ ID NO: 688 - DNA, 135 bp, Zea mays
gagtggcatcatcaagattcacacactgcatgccaacataatgcgcgtgttcatgcatccatcgccgccgctgcatcatgcatcatatataatatatatatatgtgtatgtgtgggaatcttgatgatgctgcat

SEQ ID NO: 689 - DNA, 455 bp, Zea mays
agaatcctgatgatgctgcagtggtggcagggagaactggggcacgggagccctgcgtttgccatgcccaggaggggaacggctggggacacgccggctcggaccggttctcctcttcctgcataggcgcctccctgaggttcacaaagaagcctggacaaggagatgcatacagatgtggatgctggggccgcatcgatctgctgtgaggatggacaggccactgggggcccattggctgagaaacaatggagcttgaagcttcaggagaattacaacttaatccaaaaccagtcagggtaccatcacttctgagatcatgcacgttaggttgtgaaatcctcaaattcagatcaaggatgtctccatcaaccacatctttctcaattgcaggtggaagtgggacatctccatcataggaaacagaatcaaagttcctaacagcatccggtcca

SEQ ID NO: 690 - DNA, 81 bp, Zea mays
ggcagtaccggagggaggaggccgatggggcggtggtggcatctgtcgtggcggtgttggagaatcctgatgatgctgcat

SEQ ID NO: 691 - DNA, 111 bp, Arabidopsis lyrata
gccaaatgtccccatgagttccctttaacgcttcattgttaaatactcaaagccacattggtttgtatataacactgaagtgtttggggggactcttggtgccattttggc

SEQ ID NO: 692 - DNA, 166 bp, Arabidopsis lyrata
atgacagagctacaagaagaaagtcaaatgtcttcatgagttccctttaacgcttcattgttaatattcaaactacatttatttccataaatgtttgatcgatttgtatataacactgaagtgtttggggggacttttggtgtcattctggcgtagttacgattat

SEQ ID NO: 693 - DNA, 140 bp, Arabidopsis lyrata
acaaaatataattcgactagatgtcctctagagttctcccgaacacttcattggaaatttgttattcggtaaactaccaattaattccactgaagtgtttgggggaactccggatgtcatttggtgatgtcaagccatgt

SEQ ID NO: 694 - DNA, 105 bp, Arabidopsis lyrata
gtcggatgtttcctagagttcctctgagcacttcattggagataccatcttttatcaaatggttttctactgaagtgtttgggggaactcccggactcattcgat

SEQ ID NO: 695 - DNA, 127 bp, Arabidopsis lyrata
gtcaaatgtctccttgagttcccttaaacgctttattgttcacactttgttgtctaagatcaatcgatcgattcaatcaatctgacgaacactgaagtgtttggggggactctaggtgacatatggc

SEQ ID NO: 696 - DNA, 105 bp, Arabidopsis lyrata
gtcggatgttccctagagttcctctgagcacttcattggagataccattgtctatgaaatagtattctactgaagtgtttgggggaactcctggactcattcgat

SEQ ID NO: 697 - DNA, 135 bp, Arabidopsis lyrata
gtcaactgtccccttgagttcccttaaacgcttcattgttcatactttgtgagtttgtgttctaagatctatcgaccgataaatcaatctgatgaacactgaagtgtttggggggactctaggtgacatcttggc

SEQ ID NO: 698 - DNA, 93 bp, Arabidopsis lyrata
ctcaagagttcctccgaacacttcattgaaaaaaggttctccattttcgtaatttttttttactgaagtgtttggaggaactccagatgatat

SEQ ID NO: 699 - DNA, 100 bp, Aquilegia caerulea
tggagttcctcctgccgcttcagtaatgatctattaattcctagctagttaactagtttttgacaatcttaattactgaagggtttggaggaactctaag

SEQ ID NO: 700 - DNA, 80 bp, Aquilegia caerulea
cctggagtttctcctgccgcttcaggaacgatcaattgcaaaatttgttattactgaagggtttggaggaactctgggtg

SEQ ID NO: 701 - DNA, 93 bp, Arabidopsis thaliana
atgtctcctagagttcctctgagcacttcattggggatacaatttttctaaatgattatccactgaagtgtttgggggaactcccggacccat

SEQ ID NO: 702 - DNA, 100 bp, Arabidopsis thaliana
atgtccccatgagttccctttaacgcttcattgttaaatactcaaagccacattggtttgtatacaacactgaagtgtttggggggactcttggtgtcat

SEQ ID NO: 703 - DNA, 100 bp, Arabidopsis thaliana
atgtccacatgagttccctttaacgcttcattgttgaatactcaaagccacattggtttgtatataacactgaagtgtttggggggactcttggtgtcat

SEQ ID NO: 704 - DNA, 100 bp, Arabidopsis thaliana
atgtcctctagagttctcctgaacacttcattggaaatttgttattcagtaagctaacagttaattccactgaagtgtttgggggaactcccgatgtcat

SEQ ID NO: 705 - DNA, 95 bp, Arabidopsis thaliana
atgttttctagagttcctctgagcacttcattggagatacaattttttataaaatagttttctactgaagtgtttgggggaactcccgggctgat

SEQ ID NO: 706 - DNA, 112 bp, Arabidopsis thaliana
atgtccccttgagttcccttaaacgcttcattgttcatactttgttatcatctatcgatcgatcaatcaatctgatgaacactgaagtgtttggggggactctaggtgacat

SEQ ID NO: 707 - DNA, 181 bp, Brachypodium distachyon
caggagatgaatggttggttgtcaactggagttctcctcaaatcacttcagtagctagctagctagcttgtgcctcattgtttcattgccgctgtttataagtgtgcatggagctggagagccgtgcacagtgaagtgtttgggggaactccgggtggcaaccaacaatactgatatcacc

SEQ ID NO: 708 - DNA, 238 bp, Brachypodium distachyon
acttcacaagaagctattcctagggctattgtgaagtgtttgggggaactcttgatgtcaccaagcttccatttgtagatgtttctctcaagccaaaagagatacatcagccggcatcggaccacgtttggtattaccatgagttccctgcaagcacttcacgaggcccaattatgatggctactgtgaagtgtttgggggaactcttggtgtcaccaagcttacacaaataaaaaga

SEQ ID NO: 709 - DNA, 126 bp, Brachypodium distachyon
ggcggcagaccacgtttggtaataccatgagttccctgcaagcacttcatgaggcctaattctaagggctactgtgaagtgtttgggggaactcttggtgttaccaagcttttacaacaaaaggag

SEQ ID NO: 710 - DNA, 148 bp, Brachypodium distachyon
agctcctggacgaacggttggttgtttcctggggttccctccaaacacttcagcaggtcggctttcctatactagctcacaggctgaagggtgaagtgtttggggaactctaggtgacaaccgccattttatcaaggtcaaactgctg

SEQ ID NO: 711 - DNA, 150 bp, Brachypodium distachyon
gttggttgtcacctggagttctcctcaaatcacttcagtagctagctagcttgtgcctccttgttgcattgccactgttttataagtgtgcttggggccagagagctgtgcacagtgaagtgtttgggggaactctgggtggcaaccagc

SEQ ID NO: 712 - DNA, 96 bp, Brachypodium distachyon
gtttggtgtccccgggagttcccttcaaacactttacgaagcatctttctaagactatttgtgaagtgtttgggggaactctcggtgtcaccaagc

SEQ ID NO: 713 - DNA, 89 bp, Brachypodium distachyon
ggtgttaccaggagtttcctgcaaacacttcacgagtgcctattttaatgggttgttgtgaagtgtttgggggaactcttgatgtcacc

SEQ ID NO: 714 - DNA, 76 bp, Brachypodium distachyon
accatgagttccctgcaagcacttcacgaggccgttttctgagggctactgtgaagtgtttgggggaactcttggt

SEQ ID NO: 715 - DNA, 90 bp, Brachypodium distachyon
tggtattatcatgaattccctacaagcacttcacaagaagctattcctagggctattgtgaagtgtttgggggaactcttgatgtcacca

SEQ ID NO: 716 - DNA, 88 bp, Brachypodium distachyon
ggtattctcatgagtttcccgcaagcacttcacgaggccgttttctgagggctactgtgaagtgtttgggggaactcttggtctcacc

SEQ ID NO: 717 - DNA, 86 bp, Brachypodium distachyon
gtactaccatgagttccctgcaagcacttcatgaggcccaattctgagggctactgtgaagtgtttgggggaactcttggtgttac

SEQ ID NO: 718 - DNA, 96 bp, Brachypodium distachyon
gtttggtattatcatgagttccctgcaagcacttcacgaggcactatcccaagggctactgtgaagtgtttgggggaactcttggtgtcaccaagc

SEQ ID NO: 719 - DNA, 95 bp, Brachypodium distachyon
tggtattaccatgagttcctttgcaagcatttcacgtacgaggcactatcccaagggctattgtgaagtgtttgggggaactcttggtgtcacca

SEQ ID NO: 720 - DNA, 90 bp, Brachypodium distachyon
tggtattaccatgagttccctgcaagcacttcaccatgcactaccccaagggctattgtgaagtgtttgggggaactcttggtgtcacca

SEQ ID NO: 721 - DNA, 101 bp, Citrus sinensis
atgtctccgggagttcctccgatcacttcattggggctatatgatcatttagacaaaatttgtcaccccactgaagtgtttgggggaactctgggtgccac

SEQ ID NO: 722 - DNA, 186 bp, Gossypium hirsutum
ctttttcctcgaacaactgtaacggaacgggtgagacggagaagggaaaggtggtgtccatttgaagcgaaatcggatcatccgcaatggaggatttagtaaaacccagggacagacccgatttagtatgaaataaatccattgaaaccctaaaagggaaattttttgaagtgtttgggggaactt

SEQ ID NO: 723 - DNA, 84 bp, Gossypium hirsutum
gagttcccctgaccacttcattggggatatattaaaaaccttaactgaggaaattttttcctactaaagtgtttaggggaactc

SEQ ID NO: 724 - DNA, 107 bp, Gossypium hirsutum
gagttcccctgatcacttcactggggttatggggtctgctcttctcttctcagagccttgttaaaagggaggtctccgatgacctactgaagtgtttgggggaactc

SEQ ID NO: 725 - DNA, 67 bp, Glycine max
gagttcctctgaacgcttcatgtgattggctagttataggcctttgatgaagtgtttgggggaactc

SEQ ID NO: 726 - DNA, 135 bp, Medicago truncatula
tttttgttgattgtttcttagagttcctttgaacgcttcatgcatgagaatatgtatttggtctaatatccattagaaaagatagttcttcatcaatgaagtgtttgggggaactcttgggttcaaccagcacca

SEQ ID NO: 727 - DNA, 124 bp, Medicago truncatula
tacttgttgattttctcttggagttcctctgaatgcttcaaacatgagacaatcttgatagaaattatggatagttcttgttcaatgaagtatttgggggaactcttggaattgaatcaacata

SEQ ID NO: 728 - DNA, 97 bp, Medicago truncatula
gagttcctttgaacgcttcatgcatgagaatatctatttggtctaatatccattagaaaagatagtcttttcttctatgaagtgtttgggggaactc

SEQ ID NO: 729 - DNA, 95 bp, Medicago truncatula
gagttcctttgaacgcttcatgcatgagaatatctatttggtctaaaatccattagaaaaatagttcttcttaaatgaagtgtttgggggaactc

SEQ ID NO: 730 - DNA, 100 bp, Medicago truncatula
gagttcctttgaacgcttcatgcatgagaatatctatctatttggtttaaaatccattaggatagatagttcttcttaaatgaagtgtttgggggaactc

SEQ ID NO: 731 - DNA, 98 bp, Medicago truncatula
gagttcctttgaacgcttcatgcatgagaaatatctctttggtttaaaatccattagaaaagatagtattttcttctatgaagtgtttgggggaactc

SEQ ID NO: 732 - DNA, 63 bp, Medicago truncatula
gagttcctctgaacgcttcatataagaggttatccatcttcattgaagtgtttgggggaactc

SEQ ID NO: 733 - DNA, 101 bp, Medicago truncatula
gactttctctgaacacttcatacaagaggttatccatctaatctaaaagtcattagatatttacgatgggtcgttcttcaatgaagtgtttgggggaactt

SEQ ID NO: 734 - DNA, 76 bp, Medicago truncatula
gagttcctctgaatgcttcaatcatgagacaatctatatgaatagttcttgttcaatgaagtgtttgggggaactc

SEQ ID NO: 735 - DNA, 76 bp, Medicago truncatula
gagttcctctgaatgcttcaaacatgagacaatctatatggatagttcttgttcaatgaagtgtttgggggaactc

SEQ ID NO: 736 - DNA, 98 bp, Medicago truncatula; identical to SEQ ID NO: 731

SEQ ID NO: 737 - DNA, 101 bp, Medicago truncatula
gagttcctttgaacgcttcatgcatgagaatatctatctatttggtctaaagtccattagaaaagatagccattttttcaatgaagtgtttgggggaactc

SEQ ID NO: 738 - DNA, 100 bp, Medicago truncatula
gagttcctttgaacgcttcatgcatgagaatatctatctatttggtctaaaatccattagaaaagatagttcttcttaaatgaagtgtttgggggaactc

SEQ ID NO: 739 - DNA, 101 bp, Medicago truncatula; identical to SEQ ID NO: 737

SEQ ID NO: 740 - DNA, 83 bp, Medicago truncatula
gagttcctctgaactcttcatctaaagggctatagcaagaaagaaaggaaaatccttgtatgatgaagtgtttgggggaactc

SEQ ID NO: 741 - DNA, 72 bp, Medicago truncatula
gagttcccttaaacatttcattaaggactcaatttcttctcttcaaccttgttgaagcgtttgggggaactc

SEQ ID NO: 742 - DNA, 105 bp, Medicago truncatula
tcttagagttcctttgaacgcttcatgcatgagaatatctatttggtctaaaatccattagaaaaatagttcttcttaaatgaagtgtttgggggaactcttggg

SEQ ID NO: 743 - DNA, 111 bp, Medicago truncatula
tcttagagttcctttgaacgcttcatgcatgagaatatctatctatttggtctaaagtccattagaaaagatagccattttttcaatgaagtgtttgggggaactcttgga

SEQ ID NO: 744 - DNA, 142 bp, Oryza sativa
ttgtccactggagttctcctcaatccacttcagtagatagctatggctaggcctcattgcattgcactgttacataactgtgatcatggggccaaaagctagctatgtatagtgaagtgcttgggggaactccagttgacac

SEQ ID NO: 745 - DNA, 142 bp, Oryza sativa; identical to SEQ ID NO: 744

SEQ ID NO: 746 - DNA, 86 bp, Oryza sativa
gagtccctaggagttcctttcaagcactttacgacacactgtattgagagttgtcgtgaagtgtttgggggaactcttagtgtcgc

SEQ ID NO: 747 - DNA, 89 bp, Oryza sativa
gtattatcaagagttctctttaagcacttcatacgacaccattatttatagggttgttgtgaagtgtttggaggaactctcggtgtcat

SEQ ID NO: 748 - DNA, 88 bp, Oryza sativa
gtattgtcgtgagttcccttcaagcacttcacgtggcactatctcaatgcctactatgtgaagtgtttgggggaactctcgatatcac

SEQ ID NO: 749 - DNA, 88 bp, Oryza sativa
gtattatcgagagttcccttcaaccacttcacgtggcactgtttcaaggcctattgtgtgaagtgtttgggggaactctcgatatcac

SEQ ID NO: 750 - DNA, 82 bp, Oryza sativa
ttatcgcgggttcccttcaatcacttcacatggtactatttcaaggcctactatgtgaattgtttgggggaactctcgatgt

SEQ ID NO: 751 - DNA, 86 bp, Oryza sativa
gtatcaccgtgagttcccttcgaacacttcacgtggcactatttcaatgcctattgtgaagtgtttgggggaactctcgatgtcat

SEQ ID NO: 752 - DNA, 112 bp, Oryza sativa
ttgttacctggagtttcctcaacacacttcacatctgctaggccctattacaattgcgcaatgtggagtctgcaattggtagtgaagtgtttgggggaactctaggtggcac

SEQ ID NO: 753 - DNA, 99 bp, Oryza sativa
gttttaccgggagttctcttcaagcacttcacgtagagctttctattgacatggagctttagaacaatgtgaagtgtttgggggaactcttggtaccaa

SEQ ID NO: 754 - DNA, 112 bp, Oryza sativa
gtgttcccaagagttccttgcaagcacttcacatagaacttctgttactctcatgtaacattgggaacttgagaagctactgtgaagtgtttgggggaactctaggtggcac

SEQ ID NO: 755 - DNA, 99 bp, Oryza sativa
gttttatcgggagtttccttcaagcacttcacgtagagctttctattgatatggagctttggaacaatgtgaagtgtttgggggaactcttgataccaa

SEQ ID NO: 756 - DNA, 94 bp, Oryza sativa
gcgttccttccaagcacttcacacagagcttttatttctctcacatcgattgagaacttaattagaagcttttgtgaagtgtttgggggaactc

SEQ ID NO: 757 - DNA, 120 bp, Oryza sativa
gagttctcctcaaatcacttcagtagatagctagctaggcttcattgcattacactgttacaaaactgtgagcatggggccaaaagctagttgtatatagtgaagtgtttgggggaactc

SEQ ID NO: 758 - DNA, 66 bp, Oryza sativa
gagttcccttcaagcacttcacgacgcactatttagagagttgttgtgaagtgtttgggggaactc

SEQ ID NO: 759 - DNA, 69 bp, Oryza sativa
gagttctctttaagcacttcatacgacaccattattgttagggttgttatgaagtgtttggaggaactc

SEQ ID NO: 760 - DNA, 68 bp, Oryza sativa
gagttcccttcaagcacttcacgtggcactatttcaatgcgtaccgtgtgaagtgtttgggggaactc

SEQ ID NO: 761 - DNA, 68 bp, Oryza sativa
gagttcccttcaagcacttcacatgacactatttcaatgtctattatgtgaagtgtttgggggaactc

SEQ ID NO: 762 - DNA, 68 bp, Oryza sativa
gagttcccttcaaccacttcacgtggcactattttaggacctactatgtgaagtgtttgggggaactc

SEQ ID NO: 763 - DNA, 86 bp, Oryza sativa
gtatcaccgtgagttcccttcaagcacttcacgtggcactatttcaatgcctattgtgaagtgtttgggggaactctcgatgttcc

SEQ ID NO: 764 - DNA, 143 bp, Oryza sativa
ttatccactggagttctcctcaaaccacttcagcagatagctagctaggcctcattgcattgcaccactgttgcataactatgagcatggggccaaaagttagctgcttatagtgaagtgtttggggaaactccggttggcaa

SEQ ID NO: 765 - DNA, 86 bp, Oryza sativa
acactgccaggaattcccttcaagcaattcatgaaacaatattttgagagttgttgtgaagcgtttgggggaaatctcagtgtcgc

SEQ ID NO: 766 - DNA, 69 bp, Oryza sativa
gaattctctttaagcacttcatacgacacaattatttcaagggttgttgtgaagtatttggcggaactc

SEQ ID NO: 767 - DNA, 69 bp, Oryza sativa
gagttctctttaatcatttcacatggcactattttaaggcctactgtgtgaagtgtttgggggattctc

SEQ ID NO: 768 - DNA, 96 bp, Oryza sativa
atttggtatcgccatgagttctcttcaaactcttcatacgacactaattcaagtgatgttgtgaagtgtttggagtagctcttggtgtcaccaaac

SEQ ID NO: 769 - DNA, 110 bp, Oryza sativa
tggccccaggagttccttgcaagcacttcacatagaacttcagttactctcatacaacattgtgattttgagaagctattgtgaagtgtttgggggaactctcggtgcca

SEQ ID NO: 770 - DNA, 103 bp, Picea abies
ctcacagctggttctcaatgccgggagttccttcaatcacttcgccgaatccgaaagcatttcactgaagtgtttggaggaacttcgggcgtcactgaactgc

SEQ ID NO: 771 - DNA, 226 bp, Populus trichocarpa
ggtcaccctgagttcctcctagcttcttcagtacccgtggaaagctaatgctacaattatcttgagctggtaagactggcaggtgtcagatgtggatgtgttaaaggtaatattattgattatttacggcgccattcaagtatttgttctactgttagaggatttaatcaagtatatgtggtattactcctgatttgctgaagggtttggaggaactctaggtgct

SEQ ID NO: 772 - DNA, 98 bp, Populus trichocarpa
gtgtcccctagagttcccttgagcacttcactgggacccttcagaccgaaagagtattatctttcccactgaagtgtttgggggaactcctggtgtca

SEQ ID NO: 773 - DNA, 101 bp, Populus trichocarpa
gtgtcccctagagttcctctgagcacttcattgggaatcttcgattaaatgaaagagtattatcattcctactgaagtgtttgggggaactcctggtgtca

SEQ ID NO: 774 - DNA, 101 bp, Populus trichocarpa
gtgtcccctagagttcctctgagcacttcactgggaatttccgatcaaatgaaagagtattatcattcctactgaagtgtttgggggaactcctggtgtca

SEQ ID NO: 775 - DNA, 113 bp, Populus trichocarpa
ctgtcccccggagtttccctgaccacttcactggggctataattctactcttcgtgtttaagggtagaggcaacccttcctcactgaagtgtttgggggaactctgggtggca

SEQ ID NO: 776 - DNA, 113 bp, Populus trichocarpa
ctgtcccccggagtttccctgaccacttcactggggctataattctactcctcgtgtttaagggtagaggcaacccttcctcactgaagtgtttgggggaactctgggaggca

SEQ ID NO: 777 - DNA, 102 bp, Populus trichocarpa
gtgtcccctagagttcctctgagcacttcattggggatcttccatcgacctgaaagagtattatcattcctactgaagtgtttgggggaactcctggtgtca

SEQ ID NO: 778 - DNA, 102 bp, Populus trichocarpa; identical to SEQ ID NO: 777

SEQ ID NO: 779 - DNA, 102 bp, Populus trichocarpa
gtgtcccctagagttcctctgagcacttcaatggggatcttccatcgacctgaaagagtattatcattcctactgaagtgtttgggggaactcctggtgtca

SEQ ID NO: 780 - DNA, 102 bp, Populus trichocarpa; identical to SEQ ID NO: 779

SEQ ID NO: 781 - DNA, 74 bp, Ricinus communis
ctagagttcccttgaacacttcactgggacgaaaatccattcttccaactgaagtgtttgggggaactcttggt

SEQ ID NO: 782 - DNA, 97 bp, Ricinus communis
ctggagttcccctggccgcttcattggggctattatatacccttaattatacatgtgttattcctgccctactgaagtgtttgggggaactctaggt

SEQ ID NO: 783 - DNA, 82 bp, Ricinus communis
ctagagttcccttgagcacttcactgggatgaaaaaaggtccagtcttccttcctactgaagtgtttgggggaactcctggt

SEQ ID NO: 784 - DNA, 87 bp, Ricinus communis
ctagagttcccttgaccacttcattgtggattattcttcaagctcaaggagttggtttacactgaagtgtttgggggaactcctggt

SEQ ID NO: 785 - DNA, 74 bp, Ricinus communis; identical to SEQ ID NO: 781

SEQ ID NO: 786 - DNA, 150 bp, Sorghum bicolor
ggttggttggttgtcacctggagttctccacaaactacttcagtagcaacacacacccctagtttaatgcaccgtgtttgcatgtttgtgtggagctgtgtgtgtacatagtgaagtgtttgggggaactctgggtggcaatcagcaatt

SEQ ID NO: 787 - DNA, 105 bp, Sorghum bicolor
gttaggtttggtgtccctaggagttctctgcaagcacttcacgaggcatcgttttgagagcttttgtgaagtgtttgggggaactcttagtgtcacaaatcattt

SEQ ID NO: 788 - DNA, 73 bp, Sorghum bicolor
gagttccctacaagcacttcacgagaccttggcttaataaagggttgtttgtgaagtgtttgggggaactctt

SEQ ID NO: 789 - DNA, 103 bp, Sorghum bicolor
tcaagtttggtgtccccaggagttctctgcaaacacttcacaaagcacttttttagagcttttgtgaagtgtttgggggaactcttggtgccactgatcattt

SEQ ID NO: 790 - DNA, 105 bp, Sorghum bicolor
attaggtttggtgtccccgggagttctctgcaagcacttcacgaggcactattttgagagcttttgtgaagtgtttgggggaactcttgatgccactaaccattt

SEQ ID NO: 791 - DNA, 122 bp, Sorghum bicolor
acaatgtttggtgttaccacgagttcccttcaagcacttcatgaggcaccattaaataactctatttaagattaggtgtaatatgaagtgtttgggggaactcttggtgatactcaacatcg

SEQ ID NO: 792 - DNA, 68 bp, Sorghum bicolor
gttccctaaaagcacttcacgagaccttggcttaataaagggcccttgtgaagtgtttgggggaactc

SEQ ID NO: 793 - DNA, 81 bp, Sorghum bicolor
gttcccttcaagcacttcacatgaggcaccattcaaactctgtttaagattaggtgtaatgtgaagtgtttgggggaactc

SEQ ID NO: 794 - DNA, 97 bp, Sorghum bicolor
gttccctgcaaacacttcacaagctagaccatatatagtatgcccttgcacaatgtggtatccagttacctagctagtgaagtgtttgggggaactc

SEQ ID NO: 795 - DNA, 87 bp, Sorghum bicolor
gttcccttcaagcacttcacatgaagctctttgcattatattggcggatgtagcattgagaccaatgtgaagtgtttgggggaactc

SEQ ID NO: 796 - DNA, 80 bp, Sorghum bicolor
gttcccttcaagcacttcacatgaagcttcacattggcagatgtagtcttgagaccaatgtgaagtgtttggaggaactc

SEQ ID NO: 797 - DNA, 84 bp, Sorghum bicolor
gttcccttcaagcacttcacatggagcattatttgtcttggagaaagcttaatttgatgcattgtgaagtgcttgggggaactc

SEQ ID NO: 798 - DNA, 94 bp, Solanum demissum
atgttccctagagttcccttgaccgcttcattagggttaactactttgttgtttgatgccctgctgaagtgtttgggggaactcccgggctcac

SEQ ID NO: 799 - DNA, 199 bp, Solanum lycopersicum
agggcttactttgatgttggaagccttgctgaagtgtttgggggaactcccgggttgactttgaaaattacgcaaacaagtatatataaatgcatgagtacgtattagctaaagatgatgagtacaatattgattcatgtacctttggagttcccttgaccacttcatgagagcttaatatttgattgtttgaagtcct

SEQ ID NO: 800 - DNA, 101 bp, Solanum lycopersicum
ttaaggtgttccctagagttcccttgaccacttcatgagggcttactttgatgttagaagcgttgctgaagtgtttgggggaactcctgggttgactttaa

SEQ ID NO: 801 - DNA, 77 bp, Triticum aestivum
cttacagtgggttccttgcaagcacttcatgaggcattattaaaaatgccactgtgaagtgtttgggggaactcttg

SEQ ID NO: 802 - DNA, 124 bp, Triticum aestivum
ctgaagtgtttgggggaactcttggtgtcaccaagcatttagtagacattggccacatatcataagagagatgcatcaatgggctgaatgtttggtcttaccatgggttccttgcaagcacttc

SEQ ID NO: 803 - DNA, 123 bp, Theobroma cacao
agagagtcagctgtcctctggagttcccctgaccacttcactagaggtttcctggacccttaataggaagaaacctgacctactgaagtgtttgggggaactcctgttggcacctgacaatgt

SEQ ID NO: 804 - DNA, 117 bp, Theobroma cacao
tatgccaggtgcccactagagttcccctgggcacttcagttgatttctttagagctcaaaacctcttacctgtctactgaagtgtttgggggaactccggttgccatctgagacagt

SEQ ID NO: 805 - DNA, 92 bp, Vitis vinifera
gtcccctagagttcccttgatcacttcactagggagcttcgctagttttaatgacttcctactgaagtgtttgggggaactcctggtaccga

SEQ ID NO: 806 - DNA, 90 bp, Vitis vinifera
gtcccctagagttccccttaccacttcactggggatcttctctaatgaatgcctacgtactgaagtgtttgggggaactcctggtgccat

SEQ ID NO: 807 - DNA, 92 bp, Vitis vinifera
gtcccctagagttcccttgaccacttcactggggaccttctctagttataatgacttcctactgaagtgtttgggggaactcctggtgccat

SEQ ID NO: 808 - DNA, 86 bp, Vitis vinifera
gccccctagagttcccctgaccacttcattggggatcttctctaatgacttcctactgaagtgtttgggggaactcctggtgtcat

SEQ ID NO: 809 - DNA, 92 bp, Vitis vinifera
ctcccctagagttcccttgaccacttcactggggaccttctctaattataatgacttcctactgaagtgtttgggggaactcctggtgccat

SEQ ID NO: 810 - DNA, 86 bp, Vitis vinifera
gtaccctagagttcccctgaccacttcactggggatcttctctaatgacttcccactgaagtgtttgggggaactcctggtgtcat

SEQ ID NO: 811 - DNA, 86 bp, Vitis vinifera
gtcccctagagttcccctgagcacttcattggggatccttagttttcaattcctactgaagtgtttgggggaactcccggtgtcat

SEQ ID NO: 812 - DNA, 92 bp, Vitis vinifera
gtcccctagagttcccttgaccacttcactggggaccttctctaattataatgacttcctactgaagtgtttgggggaactcctggtgctat

SEQ ID NO: 813 - DNA, 86 bp, Vitis vinifera
gccccctagagttcccctgaccacttcactggggatcttctgtaatgacttcctactgaagtgtttgggggaactcctggtgtcat

SEQ ID NO: 814 - DNA, 86 bp, Vitis vinifera
gccccctagagttcccctgaccacttcactggggatcttctttaatgacttcctactgaagtgtttgggggaactcctggtgtcat

SEQ ID NO: 815 - DNA, 92 bp, Vitis vinifera
tcccctagagttcccttgaccacttcactggggaccttctctaattataatgacttcctactgaagtgtttgggggaactcctggtgccatt

SEQ ID NO: 816 - DNA, 87 bp, Vitis vinifera
gccccctagagttcccctgaccacttcactgggggatcttctgtaatgacttcctactgaagtgtttgggggaactcctggtgtcat

SEQ ID NO: 817 - DNA, 92 bp, Vitis vinifera
gtcccctagagttcccttgaacacttcactggggaccttctctagttataatgacttcctactgaagtgtttgggggaactcctggtgccat

SEQ ID NO: 818 - DNA, 137 bp, Vitis vinifera
ggccttgagagttcccccaacccctccagtatgaccatctctcttcttcttttaatttgttcatcaaatcttcttctactatctatttccagggtgatttcctctactgaagagtctggaggaactcttggtgccac

SEQ ID NO: 819 - DNA, 149 bp, Zea mays
tattggttggttgtcacctggagttctcctcaaaccacttcagttgctgcacctagctagtttaatggcactgtgcttgcgtgcaagcggccggagctgtgtgtagctagtgaagtgtttgggggaactctgggtgtcaatcagcaatt

SEQ ID NO: 820 - DNA, 138 bp, Zea mays
tcttggttggttctcccttggagttccctgcaaacacttcaccagctaggccatagtgccggcccttgcacaatgttgtatctgatcacctagctagtgtgaagtgtttggaggaactctaggtgttatccagcaatg

SEQ ID NO: 821 - DNA, 66 bp, Zea mays
agttctatgcaagcacttcacgaggcattgtttcaagagcttttgtgaagtgtttgggggaactct

SEQ ID NO: 822 - DNA, 85 bp, Zea mays
agttcccttcaagcacttcacatgaggcaccattcaaataacacatttcaagattaggtgcatgtgaagtgtttgggggaactct

SEQ ID NO: 823 - DNA, 70 bp, Zea mays
agttacctacaagcacgtctcgataccttggcttaataaaggccagttgtgaagtgtttgggggaactct

SEQ ID NO: 824 - DNA, 66 bp, Zea mays; identical to SEQ ID NO: 821

SEQ ID NO: 825 - DNA, 85 bp, Zea mays; identical to SEQ ID NO: 822

SEQ ID NO: 826 - DNA, 70 bp, Zea mays
agttccctacaagcacttcacgataccttggcttaataaaggccagttgtgaagtgtttgggggaactct

SEQ ID NO: 827 - DNA, 85 bp, Zea mays; identical to SEQ ID NO: 822

SEQ ID NO: 828 - DNA, 84 bp, Zea mays
agtttccttcaagcacttcacatggagcattctgtcttagagaaagcttaatttattgcattgtgaagtgtttgaggaaactct

SEQ ID NO: 829 - DNA, 81 bp, Zea mays
agttccttccaaacacttcaccagctaggccatgcacaagatgaacccacattaggctagtgaagtgtttggaggaactct

SEQ ID NO: 830 - DNA, 82 bp, Zea mays
agttcctttcaaacacttcacatggagcttctcattggtggatatattcttgagacccgtgtgaagtgtttggaggaactct

SEQ ID NO: 831 - DNA, 66 bp, Zea mays
agttctctacaagcacttcacgaggcttcgtactgagagcttttgtgaagtgtttgggggaactct

SEQ ID NO: 832 - DNA, 226 bp, Zea mays
agttctcttcaagcacttcacgaggcatcacactgagagcttttgtgaagtgtttgggggaactcttggtgtcacaaatcatttgcatttgcttgatgttagtcatgcaccatgtgatatgagataaaggacatggcaacgttttgtgttactaggagttccctacaagcacttcatgagaccttgacttaataaagggccattgtgaagtgtttgggtgaactct

SEQ ID NO: 833 - DNA, 89 bp, Zea mays
agttcccttcaagcacttcacatgaggcaccattcaaatgacaactccatttaagattatgtgtaatgtgaagtgtttgggggaactct

SEQ ID NO: 834 - DNA, 125 bp, Aquilegia caerulea
agagatgagagatatgttgacagaagagagagagcacaacccatcatcagctaaagagagtcttttcttttgttgggagtgtgctctttgctcttctgtcatcatcaccaaatctctctctctct

SEQ ID NO: 835 - DNA, 107 bp, Brachypodium distachyon
cgtcaaggttaaagggagaagagagagagtacagccttaattaagctcgatcgatctgtcttgtatcaaggctgtaccctctctcttcttctcttagcttcttgatg

SEQ ID NO: 836 - DNA, 120 bp, Festuca arundinacea
tggtcgtggctggcaccgtgggtggtggtatcccatggctgagtacttgacagaagagagagagcacagcttgagtcggcggcgacccctgtgagacacccgcctggagggagctctgga

SEQ ID NO: 837 - DNA, 138 bp, Oryza sativa
atcgtgaaggctaaatggagaagagagagagtacagctttgggcggtttagttgttagatggtggaagtacttgcgacgcctactacccttttcaccaaggctgtacgctccctcttcttctcttagctttttatgat

SEQ ID NO: 838 - DNA, 149 bp, Physcomitrella patens
ctccccttttctacattcaagccgggtttcgaagagagagagcacagccctggacttttctcatgtgaccgattttagcggtacatggtgcactgtcatcgggctgttctctctctcttctagaccctacttggatgtgtttctactgc

SEQ ID NO: 839 - DNA, 149 bp, Physcomitrella patens
ttcagccgtactacacccaagccgggattcgaagagagagagcacagcccgtaactttcactaaagaccacttattgtggttcattggagatttgatgtcgggctgtgctctctcttttccagtccctactcggatgtgtcgccatcac

SEQ ID NO: 840 - DNA, 151 bp, Physcomitrella patens
ttcagctttactacatccaagccaggattcgaagagagagagcacagccccgttacttttgctgaaagaatacttcctgtgatccattgggaatttgatgttgggctgtgctctctcttttccagtccctacctggatgtgctgccattgc

SEQ ID NO: 841 - DNA, 136 bp, Physcomitrella patens
ctagcttctccacaatttctcaccctcgttgggatcagaagagagagagcacagcccgatgtccaatgttcaggtcgaatgggctgtgctctctctcttcttgctccaacttgggtgctacacgcatctagggtac

SEQ ID NO: 842 - DNA, 122 bp, Physcomitrella patens
tcagcaatttactcactcatgctgggatcagaagagagagagtacagcccaagagcaaccgcttagttggaatgggctgtgctctctctcttctggttccaacctgagtgcatgtcggttgt

SEQ ID NO: 843 - DNA, 122 bp, Physcomitrella patens
tgcacaattttctcactcatgctgggatcagaagagagagagtacagcccaacggccgatgttcagttggaacgggctgtgctctctctcttcttgttccaacctgggtgcatttccgttct

SEQ ID NO: 844 - DNA, 149 bp, Physcomitrella patens
tcacctttttctacattcaagctggggttcgaagagagagagcacagtcccagacttttcactcacgaccactttgagtgtcttatggtgaacagtagtcgggctgtactctctcttttccagtccctactcgaatgtgtttctatcgc

SEQ ID NO: 845 - DNA, 174 bp, Brachypodium distachyon; identical to SEQ ID NO: 484

SEQ ID NO: 846 - DNA, 103 bp, Sorghum bicolor; identical to SEQ ID NO: 558

SEQ ID NO: 847 - DNA, 111 bp, Sorghum bicolor
aaacagtcggtgcttgcaggtgcagcaccatcaagattcacatccccagctcgatctgtgcatgatgagatgagaatcttgatgatgctgcatcagcaaacactcacttac

SEQ ID NO: 848 - DNA, 83 bp, Zea mays; identical to SEQ ID NO: 684

SEQ ID NO: 849 - DNA, 208 bp, Sorghum bicolor
gcactattttgagagcttttgtgaagtgtttgggggaactcttgatgccactaaccatttgctagaggttggccaagtgtgtgctacatgagccaagtgtgtgctacatgaaatgatttgaagacaaatcacatttggaaattatatatcaagtttggtgtccccaggagttctctgcaaacacttcacaaagcacttttttagagct

SEQ ID NO: 850 - DNA, 104 bp, Sorghum bicolor
tcaagtttggtgtcccccaggagttctctgcaaacacttcacaaagcacttttttagagcttttgtgaagtgtttgggggaactcttggtgccactgatcattt

SEQ ID NO: 851 - DNA, 81 bp, Zea mays
gagttcctttcaaacacttcacatggagcttctcattggtcgatatattcttgagacccgtgtgaagtgtttggaggaact

SEQ ID NO: 852 - DNA, 257 bp, Zea mays
gtgaagtgtttggaggaactctaggtgttatccagcaatgtttcatagtttgtgaaactgtaaaaggttttggtaagacgatgatcagatttggtgttatcatgagttcctttcaaacacttcacatgcagcttctcattggtggatatattcttgagacccgtgtgaagtgtttggaggaactcttgataccaataagtttttcccccaaatataatagctggttgcttccccggagttccttccaaacacttcac

SEQ ID NO: 853 - DNA, 84 bp, Zea mays
gagtttccttcaagcacttcacatggagcattctgtcttagagaaagcttaatttattgcattgtgaagtgtttgaggaaactc

SEQ ID NO: 854 - protein, 307 aa, Zea mays
MASRSSLTFVLTAAPSLSACCSPVPCPSVAAPCSFFLALGLEAPLAACVAPSSPPFPMAALSPSSPSSAQRRISLLVTARRAPSAAALSPASFSLRQLALACAAPLRSSRRSSSPICAQPRTPLRSARSAAVLSPGSLCPFSTAPCSLDAHAAFRRPSPCRVLCAQSRPTAWLWPPSCLGFVHPSLFSLGKKKLWMLGPRLDQVFRFGRHRLSSFIIASCSSASLIVPMLNTAIPAVPRFRCVRLNVGPRFHDVTHPRCETLTLIIPCSISSSSFASDLARRSRSPDVRSRTSAEGRRCSGNYQIEL

SEQ ID NO: 855 - protein, 2319 aa, Zea mays
MSTQRDHVDPLLEEIPVTSSGEEVDPKVLDLAMKIAEKMFLKMKEEDARKKAEEEESRRKAEEDKGKGTFDYNDDLVDLLVSKVLSKVSLNTEGSSTKSKGNDFSKVQFDYSRNYIPNFSSAPLGKLPTLSELNYDEWADKMKSHLIGVHPSLWEIVNVGMYKPAQGEEMTPEMMQEVHRNAQAVSIIKGSLCPEEYRKVQGREDARDIWNILRMSHEGDPKAKRHRVEALESELARYDWTKGESLQSLFDRLMVLVNKIRVLGSEDWSDSKVTRLFMRAYKEKDKSLARMIRDRDDYEDMTPHQLFAKIQQHESEEAPIKTRDSHALITNEQDNLKKSKDHKAKKVVETSSDEDSSSDEDTAMFIKTFKKFVRKNDKFQRKGKKRACYECGQTGHFIADCPNKKEQEAKKEYKKDKFKKGGKTKGYFKKKKYGQAHIGEEWNSDDESSSSEEEEVVANVAIQSTSSAQLFTNLQDDSYIPTCLMAKGDKVTLFSNDFSNDDDDDQIAMKNKMIKEFGLNGYNVITKLMEKLDKRKATLDAQEDLLILEKERNLELQELIHNKDIEVINLKTSIDNLANEKNALESSMLSLNVQNQELQVQLENCKNINAPTLVFESKSSSNDNSCKHCAKYHASCCLTNHARKHSPQVKVEEILKRCSSNDGLKKVEPKYKSLKPNNGRRGLGFNSSKENPSTVHKGWRSPKFIEGTTLYDALGRIHSSNDKSSQVYSSGGSSWVLDSGCTNHMTGEKDMFHTLQLTQEAQEIVFGDSGKSKVIGIGKIPISDQQSLSNVLLVDSLSYNLLSVSQLCGMGYNCLFSDVDVKILRREDSSVAFTGRLKGKLYLVDFTTSKVTPETCLVAKSDKGWLWHRRLAHVGMRNLAKLQKDNHIIGLTNVVFEKDRVCGACQAGKQHGVPHQSKNVVTTKRPLELLHMDLFGPVAYISIGGSKYGLVIVDDFSRFTWVFFLSDKGETQEILKKFMRRAQNEFELKIKKVRSDNGTEFKNTGVEEFLGEEGIKHEFSVPYTPQQNGVVERKNRTLIEAARTMLDEYKTPDNFWAEAVNTACHAINRLYLHKIYKKTAYELLTGNKPKVDYFRVFGCKCFILNKKVKSSKFAPRVDEGFLLGYASNAHGYRVFNNSTGLVEIAIDVTFDESNGSQGHVSNDTVGNEKLPCESIKKLAIGEVRPQERDDEEGTLWMTNEVVDVGARVVSDNVSTQANPSTSSHPNHEENHQRMPTVVEDEQENIDGEVPLDQVTNEEEQIQRHPSVPHPRVHHTIQRDHPVDNILGSIRRGVTTRSRLANFCEFYSFVSSLEPLKVEEALDDPDWITAMQEELNNFTRNEVWSLVQRPKQNVIGTKWVFRNKQDENGVVTKNKARLVAQGYTQVEGLDFGETYAPVARLESIRILIAYATNHDFKLYQMDVKSAFLNGPLQERVYVEQPPGFEDPKKPNHVYLLHKALYGLKQAPRAWYDCLKDFLIKNGFTIGKADSTLFTRKVDNELFVCQIYVDDIIFGSTNEKFCEEFSKVMTNRFEMSMMGELKYFLGFQVKQLKEGTFLCQTKYTQDMLKKFGMEKAKHAKTPMPSNGHLDLNEEGKPVDQKLYRSMIGSLLYLCASRPDIMLSVCMCARFQANPKDCHLVAVKRILRYLVHTQNLGLWYPKGSFFDLLGYSDSDYAGCKVDRKSTTGTCQFLGRSLVSWSSKKQNCVALSTAEAEYIAAGACCAQLLWMKQTLRDFGCEFNKIPLLCDNESAIKLANNPVQHSRTKHIDIRRHFLRDHEAKGDIELFHAWEPASDDDGGKDDAVDLPPASAPVIRGLVLHRAEARRAGNEPVTDFTASGGSALLQDLRFQNPVLRIRDARIDGNRFWTLHHVDFYNSVILPKKHQPILHQRYINWEGCEAIGDPEMSQALRACERKQMKNIMTFQYDWNDEVIAQFYSTLWIKLADEESHYNYPFLNFFIEGSWYKVSYRRFAHILGFSDEDISGDKIKIHDFRQPTRDEAKDLHLSESGKYWESTNIHKYYCYINSLCRMTLIPKGGNQMNILGESKVLLSFMKPNSSERINVFDMIWQEIIHAACFPLKGCLHAPFIMKMIEVVTQFRFEKGTRHQSYTPFWIDPNNPAGRLRKAPSSSRGHTSAGPSAGAGAAAGASRPSPGRGSPTPRGRGRGRGRGRGMGARLAHGFAAFFSMCRNIAADVHEVARRQRETDDNLRRQASALGTPFAPRSPDVPLHPPPPDVNEWYQQAYGVPFSSADDVEEETFFDDPEQFDPPPYHGDPGQSSSYPPPQDPSGSAPPPAQSGEEHFAYDLAQHLFAPHQPPPHW

SEQ ID NO: 856 - protein, 627 aa, Eulaliopsis binata
MPGLPLPQPLNQNIGREYAYPGSTGRAFRQQLRTALSPDEKLAAERDLALYCKPVELYNIIQRRAVKNPLFIQRCLLYNIHARRKKRIQITISLSRSTNTELQAHDIFPLYVLLARPTSNLSLEGHSPIYRFSRVRLLTSFSELGNKDNSEATFIIPDVKSLSTSHPCNLDIIFISCGQVGQSNGEDNCSGNHVEGSPLQMLEGKCSWGKIPTNLLASSLESCVNLSLGHIVELASKITMRPSFLEPKFLEQDSCLTFCSHKVDATGSYQLQLCMSAQEAGARDMSLSPYSSYLYDDVPPSSLSDIIRLRSGNVLFNYKYHNNTMQETEVTEDFCCPFCYVRCGSFKGLGCHLNSSHDLFHYEFWISEDYQIVNVSLKADAWRTELIAEGVDPRHQTFSYRSRFKKRRRSKTTTDKIRHVHSHIMESGSPEDAQAGSEDNCVQGENGTSVANASIDPAQSLHGSNLSPPTVLQFGKTRKLSERADPRNRQLLQKRQFFHSHRAQPMALEQVFSDRDSEDEVDDDIADFEDRRMLDDFVDVTKDEKLIMHMWNSFVRKQRVLADGHIPWACEAFSQLHGRQLVQNPAQLRGWRFFMIKLWNHNILDARTMDTCNTVLQSFQEESTGLK

SEQ ID NO: 857 - protein, 626 aa, Zea mays
MPGLPLPQSLNKNIGCEYAYPGSTGQAFRQQLRTALSPDEKLTAEKDLALYCKPVELYNIIQRRAMKNPLFIQRCLLYNIHARRKKRIQITISLSGSTNTELQTDYLFPLYVLLARPTSNLSLEGHSPIYRFSRVCLLTSFSEHGNKDSSEATFIIPDVKSLSTSRACNLDIIFISCGQVGQSNGEDNCSGNHVEASSLQMLEGKCSWGKIPTNLLASSLESCVNLSLGHIVELASKVTMRSSFLEPKFLEQDNCLTFCSHKVDAVGSYKLQLCMSAQEAGARDMSLSPHSSYSYNDVPPSSLSDIIRLRSGNVLFNYKYYSNTMQETEVTEDFSCPFCYVRCGSFKGLGCHLNSSHDLFHYEFWISEEYQVVNVSLKADAWRTELFAEGVDPRHQTFSYRSRFKKRRRSKTTMEKIRHVHSHIMESGSPGDEAGSEDNFVQGENGTSVANASIDPAQSLHGSNLSPPTVLQFGKTRKLSERSDPRNRQLLQKRQFFHSHRAQPMQLEQVFSDRDSGDEVDDDIADFEDRRMLDDFVDVTKDEKLIMHMWNSFVRKQRVLADGHIPWACEAFSQLHGRQLIQNPALLWGWRFFMIKLWNHNILDARTMNTCNTVLQILQEESTGLK

SEQ ID NO: 858 - protein, 626 aa, Zea mays
MPGLPLPQSLNQNIGCEYAYPGSTGQAFRQQLRTALSPDEKLTAEKDLALYCKPVELYNIIQRRAMKNPLFIQRCLLYNIHARRKKRIQITISLSGSTNTELQTHYVFPLYVLLARPTSNLSLEGHSPIYRFSRVCLLTSFSEHGNKDNSEATFIIPDVKSLSTSRACNHDIIFISCGQVGQSNGEDNCSGNHVEDSSLQMLEGKCSWGKIPTNLLASSLESCVNLSLGHIVELASKVTMRPSFLEPKFLEQDSCLTFCSHKVDAVGSYKLQLCMSAQEAGARDMSLSPYSSYSYNDVPPSSLSDIIRLRSGNVLFNYKYYNNTMQETEVTEDFSCPFCYVRCGSFKGLGCHLNSSHDLFHYEFWISEEYQVVNVSLKADAWRTELFAEGVDPRHQTFSYRSRFKKRRRSKNTMEKIRHVHSHIMESGSPEDEAGSEDNFVQGENGTSVANASIDPAQSLHGSNLSPPTVLQFGKTRKLSERSDPRNRQLLQKRQFFHSHRAQPMQLEQVFSDRDSEDEVDDDIADFEDRRMLDDFVDVTKDEKLIMHMWNSFVRKQRVLADGHIPWACEAFSQLHGRQLIQNPALLWGWRFFMIKLWNHNILDARTMNTCNTVLQILQEESTGLK

SEQ ID NO: 859 - protein, 629 aa, Dendrocalamus latiflorus
MPGLPLPARDAANIGCGFGYPRSADQMCRQQSRARLSPDEQLAAEENFALYCKPVELYNIIQRRAIKNPAFLQRCLLYKIHARRKKRIQITISLSGGANTELQEHNIFPLYALLARPTSNVSLEGHSPYRFSRACLLTSFNEFGNKDHTEATFMIPDVKNLSTSRACNLNIILISCGQAGQTLGENTFSGNHVEGSALQKLEGKCFWGKIPICLLGSSLENDVDLTLGHTVELASTVSMSPSFLEPKFLEQDSCLTFCSHKVDATGSHQLQVSISAQEAGARDMSESPYSSYSYSDVPPSSLPHIIRLRAGNVLFNYKYYNNTMQKTEVTEDFSCPFCLVSCGSFKGLGCHLNSSHDLFHFEFWISEECQAVNVSLKTDAWRTELVAEGVDPRHQTFSYCSRFKKRRRFEITTEKISHVHPHIVDSGSPEDAQAGSEDDYAQRENGISVAHASVDPANSLHGSNLSPPTVLQFGKTRKLSVERADPRNRQLLQKRQFFHSHRAQPMALEQVFSDRDSEDEVDDDIADFEDRRMLDDFVDVTKDEKLIMHMWNSFVRKQRVLADGHIPWACEAFSRLHGQQLVQNSALLRCWRFFMIKLWNHSLLDARTMNTCNTILEGYQNESPDPKQT

SEQ ID NO: 860 - protein, 638 aa, Triticum aestivum
MPGLPLPQSLNQNIGCEYAYPGSTGQAFRQQLRTALSPDEQLAAEESFALYCKPVELYNIIQRRAIRNPAFLQRCLHYKIHASRKKRIQITVSLSRGTNTELPEQNIFPLYVLLATPTSNISLEGHSPIYRFSRACLLTAFSEFGNKGRTKATFIIPDIKNLSTSRACNLNIILISCVSEGQVGENRGEHNCSVDHVEGSALQKLEGKCFWGKIPIDLLGSSLENCVTLNLGHTVELASAVSMSPSFLEPKFMEQDSCLTFCSHKVDATGSYQLQVGISAQEAGAKDMSESPYSSYSYSGVPPSSLPHIIRLRAGNVLFNFKYYNNTMQKTEVTEDFACPFCLVKCGSYKGLGCHLNSSHDLFHFEFWISEECQAVNVSLKTDVWRTELVAEGVDPRHQTFSYSSRFKKRRRLGMLGTTAEKISHVHPHIMDSDSPEDAQAVSEDDFVQREEDDISAPRASVDPAQSLHGSNLSPPTVLQFGKTRKLSAERADPRNRQLLQKRQFFHSHRAQPMALEQVFSDRDSEDEVDDDIADFEDKRMLEDFVDVTDDEKLIMHMWNSFVRKQRVLADGHIPWACEAFSRLHGKHLVQNPPLLWSWRFLMIKLWNHSLLDARAMNVCGTILQGYQNESGLDPKKM

SEQ ID NO: 861 - protein, 606 aa, Oryza sativa Japonica Group
YQMCRHQPRARLSPDEQLAAEESFALYCKPVELYNIIQRRSIKNPAFLQRCLLYKIHARRKKRSLITISLSGGTNKELRAQNIFPLYVLLARPTNNVSLEGHSPIYRFSRACLLTSFHEFGNKDYTEATFVIPDVKNLATSRACSLNIILISCGRAEQTFDDNNCSGNHVEGSTLQKLEGKCFWGKIPIDLLASSLGNCVSLSLGHTVEMSSTVEMTPSFLEPKFLEDDSCLTFCSQKVDATGSFQLQVSISAQEAGAKDMSESPYSVYSYNDVPPSSLTHIIRLRSGNVLFNYKYYNNTMQKTEVTEDFSCPFCLVPCGSFKGLGCHLNASHDLFHYEFWISEECQAVNVSLKTDSWRTELLAEGVDPRHQTFSYRSRFKKRKRVEISSDKIRHVHPHIVDSGSPEDAQAGSEDDYVQRENGSSVAHASVDPANSLHGSNLSAPTVLQFGKTRKLSVERADPRNRQLLQKRQFFHSHRAQPMALEQVFSDRDSEDEVDDDIADFEDRRMLDDFVDVTKDEKLIMHMWNSFVRKQRVLADGHIPWACEAFSQFHGQELVQNPALLWCWRFFMVKLWNHSLLDARAMNACNTILEGYLNGSSDPKKN

SEQ ID NO: 862 - protein, 604 aa, Oryza sativa Japonica Group
MCRHQPRARLSPDEQLAAEESFALYCKPVELYNIIQRRSIKNPAFLQRCLLYKIHARRKKRSLITISLSGGTNKELRAQNIFPLYVLLARPTNNVSLEGHSPIYRFSRACLLTSFHEFGNKDYTEATFVIPDVKNLATSRACSLNIILISCGRAEQTFDDNNCSGNHVEGSTLQKLEGKCFWGKIPIDLLASSLGNCVSLSLGHTVEMSSTVEMTPSFLEPKFLEDDSCLTFCSQKVDATGSFQLQVSISAQEAGAKDMSESPYSVYSYNDVPPSSLTHIIRLRSGNVLFNYKYYNNTMQKTEVTEDFSCPFCLVPCGSFKGLGCHLNASHDLFHYEFWISEECQAVNVSLKTDSWRTELLAEGVDPRHQTFSYRSRFKKRKRVEISSDKIRHVHPHIVDSGSPEDAQAGSEDDYVQRENGSSVAHASVDPANSLHGSNLSAPTVLQFGKTRKLSVERADPRNRQLLQKRQFFHSHRAQPMALEQVFSDRDSEDEVDDDIADFEDRRMLDDFVDVTKDEKLIMHMWNSFVRKQRVLADGHIPWACEAFSQFHGQELVQNPALLWCWRFFMVKLWNHSLLDARAMNACNTILEGYLNGSSDPKKN

SEQ ID NO: 863 - protein, 601 aa, Eulaliopsis binata
MCLQHCSARLSPDEQLAAEKSFALYCKPVELYNIIQRRAVKNPPFIQRSLLYKIQARRKKRIQITVSLSASTNTQAQNIFPLYVLLARPTSNISLDGHSPIYRFSRVSLLTNFSEFGNEGKTEATFIIPNVKNLSTSRACNLSIIFISCGQVGQIIGEDSCSGNDVLRSSLQKLEGKCSWGKILTNRLASSLEQCVTLSTGDAVDLASTVTMNPSFLEPKFLEQDSCLTFCSHKVDATGSYQLQVSISAEEAGARELLLSPYYCNYSYNNVPPSLLPEIIRLRAGNVLFNYKYYNNTMQKTEVTEDFSCPFCLVPCGSFKGLGCHLNSTHDLFHYEFWISEECQAVNVSLKVDAWKTEFVAEGVDPRHQTFSYCSRFKKRRRLETTAKKIRHVHPHIMEPGSHEDAQAGSEDDYVQRENGLSVEHASVDHSQPVHGSNLSPPTVLQFGKSRKLSAERSDPRNRQLLQKRQFFHSHRAQPMPLEQVFSDHDSEDEVDDDIADFEDRRMLDDFVDVTKDEKLIMHMWNSFVRKQRVLADGHIPWACEAFSRCHGQRLVQNPALLWGWRFFMIKLWSHSLLDARAMNTCNTILQGYQDGSSDPK

SEQ ID NO: 864 - protein, 637 aa, Hordeum vulgare subsp. vulgare
MPGLPLPARDAADTGCEFSYPQSADQMRQQQLRARLSPDEQLAAEESFALYCKPVELYNIIQRRAIRNPAFLQRCLHYKIHASRKKRIQITVSLSRGTNTELPEQNVFPLYVLLATPTTNISLEGHSPIYRFSRACLLTSFSECGSKGRTKATFTIPDIKNLSTSRACNLNIILISCVSEGQVEENVGEHNCSVNHVEGSALQKLEGKCFWGKIPIDLLGSSLENCVTLNLGHTVELASAVSMSPSFLEPKFMEQDSCLTFCSHKVDATGSYQLQVGISAQEAGARDMSESPYSSYSYSGVPPSSLPHIIRLRAGNVLFNFKYYNNTMQKTEVTEDFACPFCLVKCGSYKGLGCHLNSSHDLFHFEFWISEECQAVNVSLKTDVWRTELVAEGVDPRHQTFSYSSRLKKRRRLGMLGTTAEKISHVHPHIMDSDSPEDAQAVSEGDFVQREEDDISAPRASVDPAQSLHDSNLSPPTVLQFGKTRKLSAERADPRNRQLLQKRQFFHSHRAQPMALEQVFSDRDSEDEVDDDIADFEDRRMLDDFVDVTNDEKLIMHMWNSFVRKQRVLADGHIPWACEAFSRLHGKHLVQNPPLLWSWRFLMIKLWNHSLLDARAMNVCGTILQGYQNESSDPKNI

SEQ ID NO: 865 - protein, 637 aa, Hordeum vulgare
MPGLPLPARDAADTGCEFSYPQSADQMRHQQLRARLSPDEQLAAEESFALYCKPVELYNIIQRRAIRNPAFLQRCLHYKIHASRKKRIQITVSLSRGTNTELPEQNVFPLYVLLATPTTNISLEGHSPIYRFSWACLLTSFSECGSKGRTKATFTIPDIKNLSTSRACNLNIILISCVSEGQVEENVGEHNCSVNHVEGSALQKLEGKCFWGKIPIDLLGSSLENCVTLNLGHTVELASAVSMSPSFLEPKFMEQDSCLTFCSHKVDATGSYQLQVGISAQEAGARDMSESPYSSYSYSGVPPSSLPHIIRLRAGNVLFNFKYYNNTMQKTEVTEDFACPFCLVKCGSYKGLGCHLNSSHDLFHFEFWISEECQAVNVSLKTDVWRTELVAEGVDPRHQTFSYSSRFKKRRRLGMLGTTAEKISHVHPHIMDSDSPEDAQAVSEGDFVQREEDDISAPRASVDPAQSLHDSNLSPPTVLQFGKTRKLSAERADPRNRQLLQKRQFFHSHRAQPMALEQVFSDRDSEDEVDDDIADFEDRRMLDDFVDVTNDEKLIMHMWNSFVRKQRVLADGHIPWACEAFSRLHGKHLVQNPPLLWGWRFLMIKLWNHSLLDARAMNVCGTILQGYQNESSDPKSI

SEQ ID NO: 866 - protein, 626 aa, Zea mays; identical to SEQ ID NO: 858

SEQ ID NO: 867 - protein, 626 aa, Zea mays; identical to SEQ ID NO: 857

SEQ ID NO: 868 - protein, 627 aa, Eulaliopsis binata; identical to SEQ ID NO: 856

SEQ ID NO: 869 - protein, 629 aa, Dendrocalamus latiflorus; identical to SEQ ID NO: 859

SEQ ID NO: 870 - protein, 638 aa, Triticum aestivum; identical to SEQ ID NO: 860

SEQ ID NO: 871 - protein, 606 aa, Oryza sativa Japonica Group; identical to SEQ ID NO: 861

SEQ ID NO: 872 - protein, 604 aa, Oryza sativa Japonica Group; identical to SEQ ID NO: 862

SEQ ID NO: 873 - protein, 601 aa, Eulaliopsis binata; identical to SEQ ID NO: 863

SEQ ID NO: 874 - protein, 637 aa, Hordeum vulgare subsp. vulgare; identical to SEQ ID NO: 864

SEQ ID NO: 875 - protein, 637 aa, Hordeum vulgare; identical to SEQ ID NO: 865

SEQ ID NO: 876 - protein, 696 aa, Sorghum bicolor
MVNFGKKLMADQLEEWREYYINYKMMKKKVKQYVQQTQTGGKNRDQVLKEFSRMLDDQIEKVVLFLLQQQGHLARRIEKLGVQRAMLMQQSDVSQICQLRQAYREVGYDLVKLLRFLDMNATGIRKILKKFDKRFGYKFTDYYVSTRANHPYSQLQQIFKQVGVVAVVGALSRNLAYLQDHQGYLANIYDYPSLILKDPVIEQINHSVQKLTHSTSFLQFLGQHALIVPEDMQSGSDLDDDKDYHFLSLLLNLVNTFLYMVNTYIIVPTADDYSVSLGAAATVCGVIIGSMAVAQIFSSVYFSAWSNKSYFRPLVFSSIMLFLGNLLYALAYDLNSLTALIVGRLLCGLGSARAVNRRYISDCVPLKSRMQASAGFVSASALGMACGPGLAGLLQTKFKIYGLTFNQNTLPGWVMCVAWLAYLFWLWISFKEPGHIASENSVNTQSSDSGRPVSGNLEDGVREPLLIDAKAGPDDDVEDNDDNDDDPEESHRPATSLAAAYRLLTPSVKVQLLIYFMLKFAMEILLSESSVVTTFYFKWTTSTVAIFLAVLGLTVLPVNVIVGSYVTNLFQDRQILVASEIMVLIGIVMSFRFTPHYSVPQYVTSALITFVFAEVLEGVNLSLLSRVMSSRLSRGTYNGGLLSTEAGTLARVAADMTITAAGNLGQSRLLNATLLPSLVICLASIVATFCTYNSLY

SEQ ID NO: 877 - protein, 692 aa, Zea mays
MVNFGKKLMADQLEEWREYYINYKMMKKKVKQYVQQTQTGGKNRDQVLKEFSRMLDDQIEKIVLFLLQQQGHLARRIENLGEQRVVLMERSDVSQICQIRQAYREVGYDLVKLLRFLDSNATGIRKILKKFDKRFGYKFTDYYVSTRANHPYSQLQQIFKQVGVVAVVGALSRNLSYLQDHQGSLANIYDYPSLILKDPVIEQINHSVQKLTHSTSFLQFLGQHALIVPGDMQSGSDLGDDKDYHFLSLLLNLVNTFLYMVNTYIIVPTADDYSVSLGAAATVCGVIIGSMAVAQIFSSVYFSAWSNRSYFRPLVFSCIMLFLGNLLYALAYDLNSLTVLIAGRLLCGLGSARAVNRRYISDCVPLKTRLQASAGFVSASALGMACGPALAGLLQTKFKIYGLTFNQNTLPGWVMCLAWIAYLFWLWISFKEPGHIATENSVSTQSSDSGRRVSGNLEGGLGEPLLIDAKAGQDEDDEDNDDPEESHTPATSLAAAYRLLTPSVKVQLLIYFMLKFAMEILLSESSVVTTFYFKWTTSTVAIFLAVLGLTVLPVNVIVGSYVTNLFQDRQILVASEIMVLIGIVMSFCFTPHYSVPQYVTSALITFVFAEVLEGVNLSLLSRVMSSRLSRGTYNGGLLSTEAGTLARVAADMTITAAGYLGQGRLLNATLLPSLVICLASIVATFCTYNSLY

SEQ ID NO: 878 - protein, 692 aa, Zea mays
MVNFGKKLMADQLEEWREYYINYKMMKKKVKQYVQQTQTGGKNRDQVLKEFSRMLDDQIEKIVLFLLQQQGHLARRIENLGEQRVVLMERSDVSQICQIRQAYREVGYDLVKLLRFLDSNATGIRKILKKFDKRFGYKFTDYYVSTRANHPYSQLQQIFKQVGVVAVVGALSRNLSYLQDHQGSLANIYDYPSLILKDPVIEQINHSVQKLTHSTSFLQFLGQHALIVPGDMQSGSDLGDDKDYHFLSLLLNLVNTFLYMVNTYIIVPTADDYSVSLGAAATVCGVIIGSMAVAQIFSSVYFSAWSNRSYFRPLVFSCIMLFLGNLLYALAYDLNSLTVLIAGRLLCGLGSARAVNRRYISDCVPLKTRLQASAGFVSASALGMACGPALAGLLQTKFKIYGLTFNQNTLPGWVMCLAWIAYLFWLWISFKEPGHIATENSVSTQSSDSGRRVSGNLEGGLGEPLLIDAKAGQDEDDEDNDDPEESHTPATSLAAAYRLLTPSVKVQLLIYFMLKFAMEILLSESSVVTTFYFKWTTSTVAIFLAVLGLTVLPVNVIVGSYVTNLFQDRQILVASEIMVLIGIVMSFCFTPHYSVPQYVTSALITFVFAEVLEGVNLSLLSRVMSSRLSRGTYNVGLLSTEAGTLARVAADMTITAAGYLGQGRLLNATLLPSLVICLASIVATFCTYNSLY

SEQ ID NO: 879 - protein, 697 aa, Oryza sativa Japonica Group
MVNFGKRLMADQLEEWKEYYINYKMMKKKVKQYVQQTQNGGRNREQVLKEFSRMLDDQIEKIVLFLLQQQGHLASRIEKLGEERALLMEQADASQISELREAYREVGIDLMKLLRFVDMNATGIRKILKKFDKRFGYKFTDYYVSTRANHPCSQLQQIFKQVGIVAVVGALSRNLAFLQDHQGNFPSIYDHPSITLKDPIIEQINHSVQKLTHATNLLQFIGQHALIIPEDMHSGSEDLVDDQSYHFMSLLLNLANTFLYMVNTYIIVPTADDYSVSLGAAATVCGVIIGSMAVAQVFSSVYFSAWSNKSYFRPLVFSSIMLFLGNLLYALAYDVNSLTVLIVGRLLCGLGSARAVNRRYISDCVPLKTRLQASAGFVSASALGMACGPALAGLLQTNFKIYGFTFDQNTLPGWIMCLAWITYLFWLWISFKEPDHIVRENSVNTPSSDSGHRRNSNLEDGLAQPFLIDAKESLDENGEDNDENEEDPEDSHKPATSLAAAYRLLTPSVKVQLLIYFMLKFAMEILLSESSVVTTFYFNWSTSTVAMFLAVLGLTVLPVNVIVGSYVTNLFQDRQILVASEIMVLIGIAMSFRFTSHYSVPQYVSSALITFVFAEVLEGVNLSLLSRVMSSRLSRGTYNGGLLSTEAGTLARVAADMTITAAGYLGQNSLLNVTLLPSFVICVASIVATFCTYNSLY

SEQ ID NO: 880 - protein, 697 aa, Hordeum vulgare subsp. vulgare
MVNFGKVLVSDQLEEWKEYYINYKMMKKKVKQYVQQTQSGGRNHEQVLKEFSRMLDEQIEKVVLFLLKQQGHLASRIEKLGQQRAILTEHCDISQVSQVREAYRQVGLDLVKLLRFVDMNATGIRKILKKFDKRFGYRFTDYYVSTRANHPYSQLQPIFKQVGIVAVAGALTRNLASLQDHQGSFISIYDHPSITLKDPVIEQINNSVQKLTNSTTFLKFLGQHALIVPEDVQTSSEDLVDDQSYHFMSLMLNLVNTFLYMVNTYIIVPTADDYSVSLGAAATVCGVIIGSMAVAQVFSSVYFSAWSNKSYFRPLVFSSIMLFSGNLLYALAYDLNSLTVLIVGRLLCGLGSARAVNRRYISDCVPLKIRLKASAGFVSASALGMACGPALAGLLQTEFKIYEVTFNQNTLPGWIMCFAWVANLVWLWISFKEPDHFAQENALSTQSSESGHGRSDNLESGLAQPLLTEAKERRNENAEDNGDNEEGRKESHKPATSIAAAYRLLTPSVKVQLLIYFMLKFAMEILLSESSVVTTFYFNWSTSTVAIFLAVLGLTVLPVNVIVGSYITNLFQDRQILVASEIMVLIGIASSFHFSSSYCVAQYVVSALITFVFAEVLEGVNLSLLSRVMSSRLSRGTYNGGLLSTEAGTLARVAADMTITAAGYLGQSQLLNATLLPSLVICVASIAATFGTYNTLY

SEQ ID NO: 881 - protein, 725 aa, Oryza sativa Japonica Group
MGIVGNVTVRKSSKKLMPNEGEIQVLNDKMVNFGKKLMADQVEEWKGYYINYKLMKKMLKQYVQQTQLGGKDREQVLKEFSRILDEQIERIVLFLLQQQGHLANRIEELGEQRAALLEQHDISQVFQLREAYREVGRDLIKLLRFVDMNATGIRKILKKFDKRFGYRFTDYYVTTRANHPYSQLQQVFKQVGIVAVVGALSRNLAYLQDHEGSVLSIYDHPSVTLKDPIIDQVNHAVQKLTHATSFLQFLGQHALIIQEDVQSGSEDLVDDQSYHFMSLILNLVNTFLYMVNTYIIVPTADDYAVSLGAAATVCGVIIGSMAVAQVFSSVYFSAWSNRSYFRPLVFSSIMLFAGNLLYALAYDLNSLTVLLIGRLLCGLGSARAVNRRYISDCVPLKIRLQASAGFVSASALGMACGPALAGLLQTRFKIYSLTFDQSTLPGWVMCIAWLVYLLWLWISFKEPGHFAKSSDTAQPAESGHQVNANLEEGLAQPLLTGSEEGQDQNAEDNDDNEEESKNSHGPATSISSAYKLLTPSVKVQLLIYFMLKYAMEILLSESSVITTYYFNWSTSAVAIFLAILGCTVLPVNAIVGSYITNLFEDRQILVASEIMVLIGIIMSFRYTPHYSVPQYVLSALITFVFAEVLEGVNLSLLSRVMSSRLARGTYNGGLLSTEAGTLARVVADATITAAGYLGPDLLLNITLLPPLVICIASLVATFCTYNTLY

SEQ ID NO: 882 - protein, 696 aa, Oryza sativa Japonica Group
MVNFGKKLMADQVEEWKGYYINYKLMKKMLKQYVQQTQLGGKDREQVLKEFSRILDEQIERIVLFLLQQQGHLANRIEELGEQRAALLEQHDISQVFQLREAYREVGRDLIKLLRFVDMNATGIRKILKKFDKRFGYRFTDYYVTTRANHPYSQLQQVFKQVGIVAVVGALSRNLAYLQDHEGSVLSIYDHPSVTLKDPIIDQVNHAVQKLTHATSFLQFLGQHALIIQEDVQSGSEDLVDDQSYHFMSLILNLVNTFLYMVNTYIIVPTADDYAVSLGAAATVCGVIIGSMAVAQVFSSVYFSAWSNRSYFRPLVFSSIMLFAGNLLYALAYDLNSLTVLLIGRLLCGLGSARAVNRRYISDCVPLKIRLQASAGFVSASALGMACGPALAGLLQTRFKIYSLTFDQSTLPGWVMCIAWLVYLLWLWISFKEPGHFAKSSDTAQPAESGHQVNANLEEGLAQPLLTGSEEGQDQNAEDNDDNEEESKNSHGPATSISSAYKLLTPSVKVQLLIYFMLKYAMEILLSESSVITTYYFNWSTSAVAIFLAILGCTVLPVNAIVGSYITNLFEDRQILVASEIMVLIGIIMSFRYTPHYSVPQYVLSALITFVFAEVLEGVNLSLLSRVMSSRLARGTYNGGLLSTEAGTLARVVADATITAAGYLGPDLLLNITLLPPLVICIASLVATFCTYNTLY

SEQ ID NO: 883 - protein, 696 aa, Oryza sativa Indica Group
MVNFGKKLMADQVEEWKGYYINYKLMKKMLKQYVQQTQLGGKDREQVLKEFSRILDEQIERIVLFLLQQQGHLANRIEELGEQRAALLEQHDISQVFQLREAYREVGRDLIKLLRFVDMNATGIRKILKKFDKRFGYRFTDYYVTTRANHPYSQLQQVFKQVGIVAVVGALSRNLAYLQDHEGSVLSIYDHPSVTLKDPIIDQVNHAVQKLTHATSFLQFLGQHALIIQEDVQSGSEDLVDDQSYHFMSLILNLVNTFLYMVNTYIIVPTADDYAVSLGAAATVCGVIIGSMAVAQVFSSVYFSAWSNRSYFRPLVFSSIMLFAGNLLYALAYDLNSLTVLLIGRLLCGLGSARAVNRRYISDCVPLKIRLQASAGFVSASALGMACGPALAGLLQTRFKIYSLTFDQSTLPVWVMCIAWLVYLLWLWISFTEPGHFAKSSDTAQPAESGHQVNANLEEGLAQPLLTGSEEGQDQNAEDNDDNEEESKNSHGPATSISSAYKLLTPSVKVQLLIYFMLKYAMEILLSESSVITTYYFNWSTSAVAIFLAILGCTVLPVNAIVGSYITNLFEDRQILVASEIMVLIGIIMSFRYTPHYSVPQYVLSALITFVFAEVLEGVNLSLLSRVMSSRLARGTYNGGLLSTEAGTLARVVADATITAAGYLGPDLLLNITLLPPLVICIASLVATFCTYNTLY

SEQ ID NO: 884 - protein, 696 aa, Sorghum bicolor
MVNFGKKLMADQVEEWKGYYINYKLMKKMLKQYVQQTQHGGKDREQVLKDFSRILDDQIERIVLFLLQQQGHLASRIEELGEKRIVLLEEYDISQVYQLHDAYREVGLDLIKLLRFVDVNATGIRKILKKFDKRFGYKFTDYYVTTRANHPYSQLQQVFKQVGIVAVVGALSRNLEYLQHHEGSFVSIYDRPAVTLKDPIIDQVNNAVQKLTHATNFMQFLGQHSLIVQEDAQSGSEDLVDDQSYHFMSLMLNLVNTFLYMVNTYIIVPTADDYAVSLGAAATVCGVIIGSMAVAQVFSSVYFSAWSNKSYFKPLVFSSIMLFLGNLLYALAYDLNSLIVLLIGRLLCGLGSARAVNRRYISDCVPLKMRLQASAGFVSASALGMACGPALAGFLQIKFKIYSLTFNQSTLPGWVMCIAWFIYLLWLWLTFKEPEHFTKTLVSEQPSESGCQGNSNLEEGLAQPLLVGIEQRQEENSEDNDDTELASESSHEPATSIASAYRLLTPSVKAQLLIYFMLKYAMEILLSESSVVTTYYFSWTTSVVAIFLAILGLTVLPVNAIVGSYITNLFEDRQILLASEVMVLIGIIMSFRFTPHYSIPQYVISALITFVFAEVLEGVNLSLLSRVMSSRLSRGTYNGGLLSTEAGTLARVVADATITAAGYLGTDLLLNITLVPSLVICIVSIAATLYTYNNLY

SEQ ID NO: 885 - protein, 698 aa, Vitis vinifera
MVAFGKKLKERQIQEWQGYYINYKLMKKKVKQYVQQIEGGAQNRRHVLKDFSRMLDTQIEKIVLFLLEQQGLLASRIAKLGEQHDALQQQPDISQISELREAYRAVGRDLLKLLFFVEINAIGLRKILKKFDKRFGYRFTDYYVKTRANHPYSQLQQVFKHVGVGAVVGAISRNLGDLQDRQGSYLSIYDQPALPLQDPVIDSIKAAVDRLTHSTNFLHFLAQHALIMQEELPTAVEEHVDDQRYHFMSLLLNLANTFLYMVNTYIVVPTADNYSMSLGAAATVCGVVIGAMAVAQVFSSVYFSAWSNKSYYRPLIFSSIVLFVGNTMYALAYDLDSIVVLLLGRLFCGLGSARAVNRRYISDCVPLKIRMQASAGFVSASALGMACGPALAGLLQINFKIYKITFNEDTLPGWVMAVAWLVYLIWLWISFKEPVRETQESNIQQESNAEPVENDALEKGLAQPLLLSSEDKQEDEDGDQDNDVSEEAPEESRGPATSIGSAYRLLTPSVKVQLLIYFMLKYAMEILLSESSVVTTYYFNWSTSTVAIFLACLGLTVLPVNIAVGSYISNMFEDRQILLASEIMVLIGILLSFNIIIPYSVPQYVCSGLIMFVSAEVLEGVNLALLSRVMSSRLSRGTYNGGLLSTEAGTIARVIADGTITLVGYLGESKLLNITLLPSLLICISSIIATFFTYNSLY

SEQ ID NO: 886 - protein, 542 aa, Sorghum bicolor
MDSAANSVGESVGESPAPAPAPEPQTPPAEPVTKGRGLRRWRRIPREQHHEGSPASPGAGTGAGATAGEDLAAQLHKRRYGPAADEPKGKQDAAAAEEVESSVASVESSFVPLEASPPPAPAPALTRLDPNLGHLIATAGFSVGAGGADSDNSDDRTSKSSTAASAPRHDFSSVGFGRERDRARSRAPGAAHGKGIRAARVRGASARVASSPAEAENSRSSVESNLRSSNAAHARRSSSGVTSNGVHKVLFPDGHQSDDEPPSADLRYATGGFYKENGSVIGRLANCDSDSNNHIFDEASAGKFENGGTHSGLDPYAESVALLQSAQEALENEIQKFVEIREETDEDSTTHQSEIEWSSSPVEELNEKIKMLESKLEEATMVINKQDSKIIELDALSQVQPQNTIACNNDLLSLPSDVDQLLLEKLEAEIQCFILTRAWQDWKLLTKDQFALNETQKSLLADHKSLETKLRHAENRAMMLEEMVDKLESQCKELSETSEVLKLQARASRVSLFCSVQFVLLCLAMGTLLVRFLPSSPDVVPT

SEQ ID NO: 887 - protein, 538 aa, Zea mays
MDSGANSIGESVGESPSLALAPEPQTRPAEPVTKGRGLRRWRRIPREQHQEGSPGSPGADTGVGASAGEDLAAQLHKRRYGPAADEPKGKQDPAAAEEVESSVASVESSFVPLEASPPPAPTRLDPNLGHLIATAGFSVGAGGADSDNSDDRTSKLSTAASAPRHDFSSVGFGRERDRARSRAPGAAHGKGIRAARVRGATMRVASSPAEAGNSRSSVESNLRSSNAAHARRSSAGVTSNGVHKILFPDGHQSDDEPPSGDMRYGTGRFYKENGSIEGRLGNCDSDSNHHTFDEASVGKFENGGTHSGLDLYGESMALLQSAQEALENEIQKFVEIRKETDEDSTAHQSEIEWSSSPVEELNEKIKMLELKLEEATMLINERDSEILELDALSHVQPQNTVACNNYPLSLQSDVDRLFLEKMEAEIQCFILTRASQDWKLLTMDQFALNEAQKSLLSDHKSLETKLRHAENRAMMLEEMVDKLESQCKALSETSEVLKLQAGASRASLFCSIQFVLLCIAIGTLLVRFLSSSPEIVPT

SEQ ID NO: 888 - protein, 532 aa, Zea mays
MDSGANSVGESVGESPVPAPAPQTRPAEPVTKGRGLRRWRRIPREQHHEGSPVSPGLGNSAGASAGEDLAAQLHKRRYGPADDKPKGKQDAAAEEVESSVASVKSSFVPLEVSPPPPPTLTRLDPNLGHLIATTGFSVGAGGADSDNSDDRTSKSSTAASAPRHDFSSVGFGRERDRARSRAPSAAHGKSIRAARVRGASSTAEADHSRSSVESNLRSSNAAHARRSITDVTSNGVHKVLFPDGQQSDDEPPSAGLRYATGGVCKENGSVVGILGNCDTGSNNHTFDEASVGKFENGETHSYLDPYVESMALLQSAQEALENEIQKFVEIRKETDEDSTIHQSEIEWSSSPVEELNEKIKMLEWKLEEATMLIKERDSKILELDALSQVQPHDTIACNDDLLSLQSDADQLLLEKMEAEIQCFILTRASHDWKLLAKNQFALNEAQKSLLTDHKSLETKLRHAENRAMMLEDMVDKLDSQCKELSEISEVLKLQARASRASLFCSVQFILLCIAIGTILVRFLPPSPEIVPT

SEQ ID NO: 889 - protein, 532 aa, Zea mays
MDSGANSVGESVGESPVAAPAPQTRPAEPVTKGRGLRRWRRIPREQHHEGSPVSPGLGNSAGASAGEDLAAQLHKRRYGPADDKPKGKQDAAAEEVESSVASVKSSFVPLEASPPPPPTLTRLDPNLGHLIATTGFSVGAGGADSDNSDDRTSKSSTAASAPRHDFSSVGFGRERDRARSRAPSAAHGKSIRAARVRGASSTAEADNSRSSVESNLRSSNAAHARRSITDVTSNGVHKVLFPDGQQSDDESPSAGLRYATGGVCKENGSVVGILGNCDTGSNNHTFDEASVGKFENGETHSYLDPYVESMALLQSAQEALENEIQKFVEIRKETDEDSTIHQSEIEWSSSPVEELNEKIKMLEWKLEEATMLIKERDSKILELDALSQVQPHDTIACNDDLLSLQSDADQLLLEKMEAEIQCFILTRASHDWKLLAKNQFALNEAQKSFLTDHKSLETKLRHAENRAMMLEDMVDKLDSQCKELSEISEVLKLQARASRASLFFSVQFVLLCIAIGTILVRFLPSSPEIVPT

SEQ ID NO: 890 - protein, 507 aa, Zea mays
MTPPVASLLPERAAPLINKKVVTRWRPLKLVYDHDIRLGQVPEKCSFRTLREFVAKRFPSSKAVLIKYKDADGDLVTITSTEELRLAELFIDKVGHEVVENGREDDNKLPVLRLHLVEVSPEQEPTLPLEEEKLEEDEELLINGEDSTLHALAVVTDAEVVKQDVENRSADQSVETGKNDCGHAECKEAEIDDWLLQFADLFRNQVGIDADAHLDLHELGMELCSEALEETVTSMEAQVLFELAASKFQEVAALALFNWGNVHMCEARKRIPLDESAPKEVMAAQLRTAYYWVKERYALAGHKYEEALKIKPDFHEGLLALGQQHFETAKLHWSYALADKADLSTWDSLETFKLFDSAEQNMRAATEMWEKVEEQRMAELKEPGACDKDGVLRKRQHGAGGQPELTPEEAAEQAAVMRQQIHLFWGNMLFERSQVEFKLSVGDWKTNLDASVERFKLAGASESDILTVLKNHFSNVASECEEKKVMTSGTEISQTNDNVEDKCVVET

SEQ ID NO: 891 - protein, 544 aa, Oryza sativa Japonica Group
MSKFNPSPPSPKLVPFSNSPPSSANASAAESSQKVTPTPLVPSSLSLKDKALMDKKVVTRSRPLKLVYDHDIRLAQMPEKCSFRTLREVVASRFPSSKAVLIKYKDADGDLVTITCSAELRLAESCVDIAGSEVIEDGARHGQKLPMLRLHIVEVSPDQEPPMPTEEEKLEQDNELLVKGEDNSPHASAAVVTDAEVTKQDVENVVAEAEQNTLTGKKDCGHAECKEAEIDDWLLQFADLFRNQVGVDADAHLDLHELGMELCSEALEETVTSEEAQALFEMAAAKFQEVAALALFNWGNVHMCAARKRIPLDESAPKKVMSAQLCTAYDWVRDRYALAGSKYEEALKIKPDFYEGLLALGQQHFETAKLHWSFALADKVDLSAWDSSQTFKLFDSAEHKMRAATEMWEKVEEQRMAELKEPSSEALKKRKKQHNADGQGELTPEEAAEQAAVMRQQIHLFWGNMLFERSQVEFKLDIADWKKNLDASIERFKLAGASESDISAVLKNHFSNTVSECEDKKIMTLDTGISQISNNIEDKCILES

SEQ ID NO: 892 - protein, 325 aa, Sorghum bicolor
MAMVQPADTAVKANEILARFRPIAPKPTLATAAAAASPVAQAAAEGVVAANRVLCHLQSRPCRARKRGRPTVVPVSPPKSGSGAQSPAKRKRAATPYPPLRCAAATACSASAVVPVSARLPLASLPPASAGAEDLAKVAAAEGRDVPVERDLLRKLLEPKVISPRAVRPVCSAIHVGCIHRTDATCTAAASKTAAQVEAELEVDALPAVVSDSSNRVRLVNDAYKEMVGQPECPWLYAVAATSRRISGEVALVVADQSSLPETYGVFTCTAKIEWEDDGKVTSIAVPCDVSRLHCESRDYLFTWRFRTADADASVGHSSEEISES

SEQ ID NO: 893 - protein, 327 aa, Zea mays
MAMVQPADTAVKANEILARFRPIAPKPTLAAAAAAAAAPVAQAAAEGVVAANRVLCHLQSRPCRARKRGRPTVVPVSPKSGAQPPAKRRRASTPYPPLRCAAATTGAHVSAVVPGSARLPPASAGVEDIAKAAAAAATEEGRDVPVERDLLRKLLEPRVISPRAVRPVWSAIHVGCIHRTDDAACTDAAVSKTAVQVEAELEVDALPAVVSDSGNRVRLVNDAYKEMVGQPECPWLDAVAATSRRISGEVALVVADRSSLPDSYGAFTCTAKIEWEDDGKVTSIAAPCDVSRLQCESRDYLFAWRFRTAAADADASVGHSSEEISES

SEQ ID NO: 894 - protein, 312 aa, Zea mays
MAMVQAADAAVKANEILARFRPIAPNPTLAAEGVVAANRVLCHLQSKPCRARKRGRPGPAVVAPSPESGLQPPAKRKRATTPYPPLRCRGPRASAAVPGSAGLPLASASLPPAGAGTAEDLAKVAAEGRDVPVERDLLRKLLEPKVISPRAVRPVCSAIHVGCIHRADATCTAAVSKTAVRVEAELEVDALPAVVSDASNRVRLVNDAYKEMVGQPECPWLDAVAATSRRISGEVALVVANQSSLPESYGVFTCTAKIEWEDDGKVASIDVPCDVSRLQCESREYLFVWRFRTADADADASVGCSSEEISES

SEQ ID NO: 895 - DNA, 1306 bp, Zea mays
ccagctttatcttcagccgcgcgcagccgctcttttctaccccagcgccgcgcgcatgcccctgtcgcgcagctcctggctcgcccctgcgatcgccatggcgattccccctgcgtcagcttcctcggcgttcatcaccctgctcccctcgccggcgccgagttcctgccccatcttcctcgccgagcttctctgctgcgcgctggtttctcccccatggcgcatcactgctcggttccatggccagccgaagctccctgacgttcgtcctgaccgccgcgccttctctctctgcttgctgctcgccggtgccctgtcccagtgtcgcggcgccctgctcattcttcctggcgctcggccttgaagctcccttggctgcctgcgtcgcgcccagttctcctccctttcccatggctgctctctctccttcctctccctcctctgcgcagcgccgcatctctctgctggtcacggcacgtcgagcccccagcgctgcggccctttccccagcttctttctccctgcggcagctcgccctcgcttgtgccgcgcccctgcgctcgtcgcggcgctccagctcgcccatctgcgcgcagccacgaactcccctgcgctctgctcgcagcgccgcagttctttctcccggctccctctgtccgttctcgaccgcgccttgctccctggacgcgcacgcagcgttccgtcgtccctcgccatgccgagttctctgcgcgcagtcgcgtcccactgcttggctatggccaccatcgtgcctaggatttgtgcatccttctctgttcagcctcggcaaaaaaaaactctggatgcttggaccccgcctcgaccaagtcttccgttttggccgtcataggttgtcgtcgttcatcatcgcgtcgtgcagcagcgcgtcccttatcgtgcccatgcttaatactgccattcctgctgtgcctcgcttccgttgtgttcgattaaatgttggaccaagattccacgatgtcactcatcctcgttgtgaaaccctcacgctcatcatcccctgttcgatctcgtcgtcgagcttcgcctcagacttagctcgtcggtcacgctcgccagatgttcgatcaaggacttcagctgaaggccgtcgttgttcaggcaactaccaaatcgaattgtgatgtggtgagccgattcgctatttttactatcggttttatgatcgtaaaataagacgcttcgtatgcgtatacgattaagttagaaataccagtgatgcgaggtgtgcgcttggtaattatggctagatccgttgttatggtgt

SEQ ID NO: 896 - DNA, 1984 bp, Eulaliopsis binata
agaaagaactcgtggtgggtccgggtcgcaagaccctaggtgttcgttcgtcagcaacgaaaccagcgaggatgcccggcctgcctctgcctcaaccgttaaatcagaatatcggacgcgaatatgcttatcctgggtcgaccggccgggccttccgccagcagctaagaactgcattgtctccagatgagaaacttgctgctgaaagagatttggctctgtattgcaagccagtcgagctctacaatattattcaacggcgagctgtgaaaaacccactttttattcaaagatgtcttctttacaatatacacgcgaggaggaaaaagaggattcagataaccatatcactttctagaagtacaaatactgagttgcaggcacatgatatctttcctctttatgttctgttagctagacctactagtaacctttcacttgaagggcattctccaatttatcgattcagtcgggttcgcttgcttacttcttttagtgaacttggaaataaggacaacagtgaagccacattcattattcctgatgtgaagagtttgtcaacctcccatccttgcaaccttgacatcatctttattagctgtgggcaagtcggacaaagtaatggtgaagataactgctctgggaaccatgtggaaggttctcctctccagatgcttgaagggaaatgctcctggggtaaaataccaactaatttacttgcttcgtctttggagagttgtgtcaatttaagtttgggacatattgtggagttggcatctaaaattacaatgagaccaagcttcttagagccaaaatttctggagcaagacagttgcttgacattttgctctcataaggttgatgctacgggttcatatcagctacagctatgcatgtccgcacaagaggctggtgcaagagacatgtctttgtctccgtatagtagttacttatatgatgatgtcccaccttcatcattatcagatatcataaggttaagatctgggaatgtactttttaattacaagtaccacaataatacgatgcaagagactgaagtcactgaagatttctgttgtccgttttgctatgtacgatgtggaagcttcaagggtctgggatgccatttaaactcatcgcatgacctattccactatgagttttggatatctgaagactaccagattgttaatgttagcctgaaggccgatgcttggagaaccgagcttattgctgagggcgttgatccgaggcatcaaacgttttcttaccgctcaaggtttaagaagcgtagacgatcaaagaccacaactgataaaatcaggcatgtacattcacatattatggaatcagggtcacctgaagatgcccaggcaggatctgaggacaactgtgtgcaaggggagaatgggacttctgtagcaaatgcttcgattgatcctgctcaatctttacatggcagcaatctttcaccaccaacagtactacagtttgggaagacgaggaagctatctgagcgagctgaccctagaaatcggcaactcctgcaaaaacggcagttcttccattctcacagagcgcagccaatggcactggaacaagtattctcggaccgtgatagtgaagatgaagttgatgatgatattgctgactttgaggatagaagaatgcttgatgattttgttgatgttacaaaagacgaaaaacttattatgcatatgtggaattcattcgttcggaaacaaagagtgctagcggatggtcatataccttgggcctgtgaggcattctctcagttgcatggacgacaacttgtacagaatcccgctcaactgcggggctggcgtttcttcatgattaaactttggaaccacaacatcttagatgcccgcaccatggacacatgcaacacagtacttcaaagtttccaagaagaaagcacaggcctaaagtaattttgatgcttcggaccaaagatttaagg

SEQ ID NO: 897 - DNA, 2073 bp, Zea mays
gaccctaggtgttcgtcagcagcgaggatgcccggcctgcctctgcctcaatcgttaaataagaatattggatgtgaatatgcctatcctgggtctacaggccaggccttccgtcagcagctaagaactgcattgtctccagatgagaaacttaccgctgaaaaagatttggctctgtattgcaagccagtcgagctctacaatattattcaacggcgagccatgaaaaatcccctttttattcaaagatgccttctttataatatacatgcgaggaggaaaaagaggattcagataaccatatcactttctggaagtacaaatactgagttgcaaacagattacctctttcctctttatgttctgttagctagacccactagtaacctttcacttgaagggcattctccaatttatcgattcagtcgggtttgcttgcttacttcctttagtgaacatggaaataaggacagcagtgaagctacattcatcattcctgacgtgaagagtttgtcaacctcccgtgcttgcaaccttgatattatctttatcagctgtgggcaagttgggcaaagtaatggtgaagataactgctctgggaaccatgtggaagcttcttctctccaaatgcttgaagggaaatgctcctggggtaaaataccaactaatttacttgcttcatctttggagagttgtgtcaatttaagtttgggacatattgtggagttggcatctaaagttacaatgagatcaagcttcttagagccaaaatttctggagcaagacaattgcttgacattttgctctcataaggttgatgctgtgggttcatataaactacaactatgcatgtccgcacaagaggctggtgcaagagatatgtctttgtctccacatagtagttactcatataatgatgtcccaccctcgtcattatcagatatcataaggttaagatctggcaatgtactttttaattacaagtactacagtaatacaatgcaagagactgaagtcactgaagatttctcttgtccattttgctatgtacgatgtggaagcttcaagggtctaggatgccatttaaactcgtcacatgatctattccactatgagttttggatatccgaagagtaccaggttgttaatgttagtctgaaggctgatgcttggagaacagagctttttgcggagggcgttgatccaaggcatcaaacattttcttatcgctcaaggtttaagaagcgtagacgatcaaagacaacaatggagaaaatcaggcatgtacactcacatattatggagtcaggttcacctggagacgaggcaggatctgaggacaactttgtgcaaggggagaatgggacttctgtagcaaatgcttcgattgatcctgctcaatctttacatggcagcaatctttcaccaccaacagtactacagtttgggaagacaaggaagctatctgagagatctgaccctagaaatcggcaactcctgcaaaaacgacagttcttccattctcacagggcgcagccaatgcaactggagcaagtgttctcggaccgtgatagtggagatgaagttgatgatgatattgctgacttcgaggatagaagaatgcttgatgattttgttgatgttacgaaagatgaaaaacttattatgcatatgtggaattcgtttgttcgaaaacaaagagtgttagctgatggtcatataccttgggcctgcgaggcattctcccagttgcatggacgacaacttatacaaaatcctgctctgctgtggggttggcgtttcttcatgattaaactttggaaccataacattttagatgcccgcactatgaacacatgcaatacagtccttcaaattttacaagaagaaagcacaggactaaagtaattttgatgcttctgatgaaaattcaagggaagaagatttctttaccatttccaagaagaaagcatagaattggagtaactttttattgataatttcattcatatctattgtcaattgtattaatggtttttaaaagagacaaatcatgtctaactctcacgctgt

SEQ ID NO: 898 - DNA, 2195 bp, Zea mays
tctcgctgccccgcttgaccgcctgctagcgctgcagtttgatgctgatgacctgatccctccgttgggtaggttcttgggcgcggaaagaacaaagaactcgtggtgggtccgggtccgcaagaccctaggtgttcgtcagcagcgaggatgcccggcctgcctctgcctcaatcgttaaatcagaatattggatgtgaatatgcctatcctgggtctacaggccaggccttccgtcagcagctaagaactgcattgtctccagatgagaaacttaccgctgaaaaagatttggctctgtattgcaagccagtcgagctctacaatattattcaacggcgagccatgaaaaatcccctttttattcaaagatgccttctttataatatacatgcgaggaggaaaaagaggattcagataaccatatcactttctggaagtacaaatactgagttgcaaacacattatgtctttcctctttatgttctgttagctagacccactagtaacctttcacttgaagggcattctccaatttatcgattcagtcgggtttgcttgcttacttcctttagtgaacatggaaataaggacaacagtgaagctacattcatcattcctgacgtgaagagtttgtcaacctcccgtgcttgcaaccatgatattatctttattagctgtgggcaagttggacaaagtaatggtgaagataactgctctgggaaccatgtggaagattcttctctccaaatgcttgaagggaaatgctcctggggtaaaataccaactaatttacttgcttcatctttggagagttgtgtcaatttaagtttgggacatattgtggagttggcatctaaagttacaatgagaccaagcttcttagagccaaaatttctggagcaagacagttgcttgacattttgctctcataaggttgatgctgtgggttcatataaactacaactatgcatgtccgcacaagaggctggtgcaagagatatgtctttgtctccatatagtagttactcatataatgatgtcccaccttcgtcattatcagatatcataaggttaagatctggcaatgtactttttaattacaagtactacaataatacaatgcaagagactgaagtcactgaagatttctcttgtccattttgctatgtacgatgtggaagcttcaagggtctaggatgccatttaaactcatcacatgatctattccactatgagttttggatatctgaagagtaccaggttgttaatgttagtctgaaggctgatgcttggagaacagagctttttgcggagggcgttgatccaaggcatcaaacattttcttatcgctcaaggtttaagaagcgtagacgatcaaagaacacaatggagaaaatcaggcatgtacactcacatattatggaatcaggttcacctgaagatgaggcaggatctgaggacaactttgtgcaaggggagaatgggacttctgtagcaaatgcttcgattgatcctgctcaatctttacatggcagcaatctttcaccaccaacagtactacagtttgggaagacaaggaagctatctgagagatctgaccctagaaatcggcaactcctgcaaaaacgacagttcttccattctcacagggcgcagccaatgcaactggagcaagtgttctcggaccgtgatagtgaagatgaagttgatgatgatattgctgacttcgaggatagaagaatgcttgatgattttgttgatgttacgaaagatgaaaaacttattatgcatatgtggaattcatttgttcgaaaacaaagagtgttagctgatggtcatataccttgggcctgcgaggcattctcccagttgcatggacgacaacttatacaaaatcctgctctgctgtggggttggcgtttcttcatgattaaactttggaaccataacattttagatgcccgcactatgaacacatgcaatacagtccttcaaattttacaagaagaaagcacaggactaaagtaattttgatgcttctgatgaaaattcaagggaagaagatttctttaccatttccaagaagaaagcatagaattggagtaactttttattgataatttcattcatatctattgtcaattgtattaatggtttttaaaagagacaaatcatgtctaactctcacgctg

SEQ ID NO: 899 - DNA, 2518 bp, Dendrocalamus latiflorus
gcgggggggggacgacaggtcaagcagcagaggcgtgcgtcgcccccagattctctcgactcccaaccccgccgccgccgtacttccgtcggaacccaccaggagagccgtcgatagatctcctccgccccgcccgctaccggagatccatccggagcacggcctctgctcccggcgcttgtgtgcgcgcggattccggtggggggtcctgcgacctcgcaggacccgaggtgctcgtcggcggcgaggatgcctggcctaccgctacctgcccgggacgcagcgaatattggatgtggatttggttatccccggtctgcagaccagatgtgccgtcaacagtcaagagctcgattgtccccagatgagcagcttgctgccgaagaaaattttgcgttgtactgcaagccagttgagctgtacaatattattcagcgacgagccattaaaaatcccgcttttcttcaaagatgccttctttacaagatacatgcaagacggaaaaaaaggattcaaataaccatttcactttctggaggtgcaaatactgagttgcaagaacataatatctttcctctttatgccctattagctagacctactagtaatgtttcgcttgaagggcattctccatatcggttcagtcgggcttgtttgctgacatcttttaatgaattcggaaataaagaccacactgaagccacattcatgattcctgatgtgaagaatttatcaacctcccgagcttgcaaccttaacattatccttattagctgtgggcaagctgggcaaacacttggtgaaaataccttctctgggaaccatgtggaaggttctgctctccaaaagcttgaagggaaatgtttctggggtaaaataccaatttgtttacttggttcgtctttggagaatgatgtggacttaactttgggacatactgtggagttggcttctaccgttagtatgagcccaagcttcttagagccaaaatttctggagcaggacagttgcttgacattttgctctcataaggttgatgcaacgggttcacatcaactacaagtaagcatatctgctcaagaggctggtgcaagggacatgtctgagtctccttatagtagttactcatatagtgatgttccgccttcatcattaccacatattataaggttaagagctggtaatgtgctttttaactacaagtactacaacaatactatgcaaaagaccgaagtgactgaagatttttcttgccccttttgcttggtatcatgtggaagcttcaagggtctgggatgtcacttaaactcatcgcatgacctattccactttgagttttggatatctgaagagtgccaggctgttaatgttagtctgaagactgatgcctggagaactgagcttgtggctgagggagttgatccaagacatcaaacattttcctactgctcaaggtttaagaagcgtagaaggtttgaaatcacaactgagaaaattagtcatgtgcatccacatattgtggattcwggttcacctgaagatgcccaggcagggtctgaagatgactatgcgcaaagggaaaatgggatttctgtagcacatgcttctgttgatcctgctaactcgttacatggcagcaatctttcaccaccgacagtactacagtttgggaagacaaggaagctatctgttgagcgagctgaccccagaaaccggcaactcctgcaaaaacgtcagttcttccattctcacagggcacagccaatggcattggaacaagttttttcagatcgtgatagtgaagacgaagttgatgatgatatcgccgactttgaagatagaaggatgcttgatgattttgttgatgttacaaaagatgagaagcttattatgcatatgtggaattcatttgttcggaaacaaagggtgctagccgatggtcatataccttgggcctgcgaggcattctcccggcttcatggacaacaacttgtgcaaaactctgctctgctgcggtgctggcgtttctttatgattaaactctggaatcacagcctactagatgcccgcaccatgaacacctgcaacaccattcttgaaggataccaaaatgaaagcccggatcccaaacaaacttgaccgatagaaatcattggccaactcaagtagaatgtactggtacgtgtattggttctggtcatttcaagagctttttttgaaccaaaagcttttgtgaagaactggatgctagcatgtgtttggaggaaagaagctttaggagcagctttgctttgggaagaagagggggcaaaactgcaccctaggcttaggctgtcattgttttattgaggactgcaccctaggcttaggctgtcattgttttattgaggactgcaccctaggctttggctgtcattgcttattctcttctatttattgatggtattgaaactgtaatagtccggatgagtatgaatttgtatgaattattattcgttgtattcaaaaaaaaaaaaaa

SEQ ID NO: 900 - DNA, 2101 bp, Triticum aestivum
gggtccgggtccgcaagaccctaggtgttcgtcagcagcgaggatgcccggcctgcctctgcctcaatcgttaaatcagaatattggatgtgaatatgcctatcctgggtctacaggccaggccttccgtcagcagctaagaactgcattgtctccagatgagcagcttgctgctgaagaaagtttcgcgttgtactgcaagccagttgagctatacaatatcattcagcggcgagccattagaaatcccgcttttctgcaaagatgccttcattacaagatacatgcaagccgaaaaaagaggattcagataacggtatcactatctcgaggtacaaatactgagttgccagaacagaatatctttcctctttatgttctgttggctacacctaccagtaatatttcgcttgaagggcattctccgatatatcgattcagtcgggcttgtttgcttaccgcttttagtgaatttggtaataaaggtcgcaccaaagctacattcataattccagacatcaagaatttatcaacctcccgagcttgcaaccttaacattatccttatcagctgcgtttcggaagggcaagttggggaaaatcgtggtgaacataactgctctgtggaccatgtggaaggctctgctctccaaaagcttgaagggaaatgtttctggggtaaaataccaattgatctacttggttcgtctttggagaactgtgtaactttaaatttgggacatacagtggagttggcttctgcagttagtatgagcccaagtttcttagagccgaaatttatggagcaggacagttgcttgacattttgctctcataaggttgatgctacgggttcatatcaactccaagtaggcatatctgctcaagaagctggtgcaaaagacatgtctgaatctccatatagtagttactcatacagtggtgtcccaccttcttcattaccacatatcataaggttgagagctggtaatgtgcttttcaacttcaagtactacaacaatactatgcaaaagactgaagtcactgaagattttgcttgccccttctgcttggtaaaatgtggaagctacaagggtttggggtgtcacttgaactcatcacatgacctattccactttgagttttggatatctgaagaatgccaggctgttaatgttagtctgaagactgatgtctggagaactgagcttgtggctgagggagttgatccaagacatcaaacattttcctactcctcaaggtttaagaagcgtagaaggttgggaatgttgggaaccacagctgagaaaataagccatgtacatccacatatcatggattcagattcacctgaagacgcccaggcagtgtctgaagacgactttgtgcagagggaggaagatgatatttctgcaccacgtgcttctgttgatcctgctcaatcattacatggtagcaatctttcaccacccacagtactacagtttgggaagacaaggaaactatctgcggagcgagctgatcccagaaaccggcaactcctgcagaaacgtcagtttttccattctcacagggcacagccaatggcactggaacaagttttctcggaccgtgatagtgaagatgaagttgatgatgacatcgccgattttgaagataaacggatgcttgaggattttgttgacgtcacagacgatgagaaacttattatgcatatgtggaattcatttgttcggaaacaaagggtgctagctgatggtcatattccttgggcctgtgaggcattctcccggcttcatggaaaacatcttgtacagaatcctcctctactatggagctggcgtttccttatgattaaactctggaaccacagtctattagatgcccgcgccatgaatgtctgcggcacaattcttcaaggctaccaaaatgaaagcggcttggaccccaagaaaatgtgagttgagcatagtgcgctcattataatttaaatcaagtgggtgtttggaggaggccttaggagcatgttaaagagaggtgaaagctgcacctgaggccatggaggactattctcgattttatttatcgatcggttgtgttaa

SEQ ID NO: 901 - DNA, 2320 bp, Oryza sativa Japonica Group
aattagggtggggtggtaggcgaaattactaacttaccctcgccatttcgacgcctcctccgtggtgtcgtcgtgcgcgagctatgctgagtttgcccttgcccaccgcttccgcctccgccgatccccatccctcccgcgagcaggagcaggagcaggagcagggctagccgtcgttcctcctgctgcttccgccgcatccatcctgataccagatgtgccgccaccagccaagggctcggctctctcccgatgagcagcttgcagctgaagaaagcttcgcattatactgcaagccggtcgagttgtataatatcattcagcgccgatccattaaaaatcctgcttttcttcaaagatgccttctttacaagattcacgcaagacggaagaagaggagcctgataaccatatcactttctggaggcacaaataaagaactgcgggcacaaaatatctttcctctttatgttctgttagctagacctactaataatgtttcacttgaagggcattctccgatatatcgattcagtcgtgcttgtttgttgacttcttttcatgaatttggaaataaagactacactgaagcaacattcgtcattcctgatgtgaagaacttagcaacctcccgagcttgcagccttaatattatccttatcagctgtggacgagctgagcaaacttttgatgacaataactgttctgggaaccatgtggaaggctctactctccaaaagcttgaagggaagtgtttctggggtaaaataccaatcgatcttcttgcttcatctttgggaaattgtgtgagcttaagtttgggacataccgtggaaatgtcttccacggttgagatgaccccaagcttcttagagccaaaatttctggaggatgacagttgcttgacattttgctctcagaaggttgatgctactggttcatttcaactgcaagttagcatatctgctcaagaggctggtgcaaaagacatgtccgagtctccttatagtgtttattcatataatgatgtgccaccttcgtcattgacacatattataaggttgagatctggcaatgtgctttttaactacaaatactacaataatactatgcaaaaaaccgaagtcactgaagatttttcttgcccattttgcttggtaccatgtggcagctttaagggtctaggatgtcacctaaacgcatcgcatgaccttttccattatgagttttggatatctgaagagtgccaggctgttaatgttagtctgaagactgattcttggagaacagagcttttggctgagggagttgatccaagacatcaaacattttcgtaccgctcaagatttaagaagcgtaaaagggtggaaatctcaagtgataaaattaggcatgtacatccacatattgtggattcaggatcacctgaagatgcccaggcaggatctgaagacgattacgtgcagagggaaaatggtagttctgtagcacacgcttctgttgatcctgctaattcattacacggtagcaatctttcagcaccaacagtgttacagtttgggaagacaagaaagctgtctgttgaacgagctgatcccagaaatcggcagctcctacaaaaacgccagttctttcattctcacagggctcaaccaatggcattggagcaagttttctcagatcgtgatagtgaagatgaagttgatgatgacattgctgattttgaagatagaagaatgcttgatgattttgttgatgttacaaaagacgagaaacttattatgcatatgtggaattcatttgttcggaaacaaagggtactagcggatggccatattccctgggcatgcgaagcattctcgcagtttcatggacaagaacttgtacaaaatccagctctactatggtgttggaggttttttatggtcaaactctggaaccacagtctactggatgcgcgagccatgaatgcctgcaacacaattcttgaaggctacctgaacggaagctcggatccaaagaaaaattgacgcatacaaatcattggccaacctgtagagtaaaatgcacttgtactggttctggccattccaatagtttgttttgtttttggaaaaaaagatgtctgaagaattgaaagctaacatgtgttttggagggaagaaaattgaaggctggggcggtcattgtttcatttagaactcttctcgattctatttattgtaattgatgttactcataactgtagagcagtatcaagaccaaactgtaatgatatggttagcaatatttacataaaagtttattttgtttgttgttt

SEQ ID NO: 902 - DNA, 1935 bp, Eulaliopsis binata
acgcctccctctccttcttccccaggaatattggagatgtgtcttcaacactgtagtgctcgattgtctccagatgagcaactcgctgcagaaaaaagttttgccttgtattgcaagccagttgagctctacaatattatccagaggcgagccgttaaaaatcccccttttattcaaagatcccttctatataagatacaggcaaggagaaaaaagaggattcagataactgtatcactttctgcaagtacaaatacacaagcacagaatatctttcccctttatgtacttttagctagacctaccagtaatatttcgcttgatgggcattctccgatatatcgattcagtagggtttctttgcttacaaattttagcgaatttggaaatgaaggcaaaactgaagccacattcatcatccctaatgtgaagaatttgtcaacctcccgtgcttgcaaccttagcattatatttattagctgtgggcaagtaggacaaattattggtgaagatagctgctctgggaatgatgtgttaagatcttccctccaaaagcttgaagggaaatgctcctggggtaaaatactgactaataggcttgcgtcctctttggagcaatgtgtgactttaagtacaggagatgctgtggatttggcttctacagttacaatgaacccaagcttcttagagccaaaatttctggaacaagacagttgcttgacattttgctctcataaggttgatgctacgggttcataccagttacaagtatccatatccgcagaagaggctggtgcaagagagttacttttgtctccttattattgtaactactcatataataatgtcccaccttcgttattaccggaaatcataaggttgagagctggaaatgtactttttaattacaagtactacaataatacaatgcaaaagactgaagttactgaggatttttcctgcccattttgcttggtaccatgtggaagcttcaagggactgggatgccacttaaactcaacacatgatctgttccactatgagttctggatatctgaagagtgccaggctgtgaatgttagtctgaaggttgatgcctggaaaactgagtttgtggcagagggagttgatccaaggcatcaaacattttcctactgctcgaggtttaagaagcgtagaaggttggaaaccacagctaagaaaatcaggcatgttcacccgcatattatggaaccaggatcacatgaagatgcccaggcagggtctgaagatgactatgtacaaagagagaacgggctttctgtagaacatgcttcagttgaccatagtcagcctgtacatgggagcaatctttcaccaccaacagtgctacagtttgggaagtcgaggaagctatctgctgagcgatctgaccccagaaatcgacaactgctgcaaaagcgtcagttcttccattcacacagggcacagccaatgccattggaacaagtcttctcagatcatgatagtgaagacgaggtcgatgatgatattgccgactttgaggatagaaggatgcttgatgattttgttgatgttacaaaagatgagaagcttattatgcatatgtggaattcatttgttcgaaaacaaagggtgctagctgatggccatataccttgggcctgcgaggcattctccagatgccacggacaacggcttgtacaaaaccctgccctgctgtggggctggcgttttttcatgattaaactctggagccacagccttcttgatgcccgcgccatgaatacttgcaacacaattcttcaaggctaccaagacggaagttcggaccccaagtaaatttaatacaaaaaaattgctggccaacttgtgtaaaatggcattggatgttgatctgccaattccaggggttgaaccccaaaacaactatgg

SEQ ID NO: 903 - DNA, 2494 bp, Hordeum vulgare subsp. vulgare
ggaaaaactaagttcttcgtctcgtgctcccttctggcccaatgcggttctaaatctctctccgccgcctcgccgtcgtcgccgcctcacggccggaacgtcgccgccactcacgcgcctcgacgccgccactcacgcgcctcgacgccgccgccatcgctatccctgctctctccacccgtccgcgagcttcgacatcggtctttgagtccccgccggttgatgccccttgttaaatccgcccgtccgcgaccctgaggcgctcggcggcggcgaggagatgcctggcctacctttacctgcccgggacgcagcggacactgggtgtgaatttagttaccctcagtctgcagaccagatgcgacagcaacagttgagagctcgattatctccagatgagcagcttgctgctgaagaaagtttcgcgttgtactgcaagccggttgagctatacaatatcattcaacggcgagccattaggaatcccgcttttctgcaaagatgccttcactacaagatacatgcaagccgaaaaaagaggattcagataactgtatcactatctcgaggtacaaataccgagttgccagaacagaatgtctttcctctttacgttctattagctacacctactactaatatttcacttgaagggcattctccgatatatcgattcagtcgggcctgtttgcttacgtcttttagtgaatgtggtagtaaaggtcgcaccaaagctacattcacaattccagacatcaagaatttatctacctcccgagcttgcaaccttaacattatccttatcagctgtgtttcggaagggcaagttgaggaaaatgttggtgaacataactgctctgtgaaccatgtggaaggctctgctctccaaaagcttgaagggaaatgcttctggggtaaaataccaattgatctacttggttcgtctttggagaactgtgtaactttaaatttgggacatacagtggagttggcttctgcagttagtatgagcccaagtttcttagagccgaaatttatggagcaggacagttgcttgacattttgctctcataaggttgatgctacgggttcatatcaactccaagtaggaatatctgctcaagaggctggtgcaagagacatgtctgaatctccatatagtagttactcatacagtggtgtcccaccttcatcattaccacatatcataaggttgagagctggtaatgtgcttttcaacttcaagtactacaacaatactatgcaaaagactgaagtcactgaagattttgcctgccccttctgcttggtaaagtgtggaagctacaagggtttggggtgtcacttgaactcatcacatgacctattccactttgagttctggatatctgaagaatgccaggctgttaatgttagcctgaagactgatgtctggagaactgagcttgtggctgagggagttgatccaagacatcaaacgttttcctactcctcaaggcttaagaagcgtagaaggttgggaatgttgggaaccacagctgagaaaataagccatgtgcatccacatatcatggattcagattcacctgaagatgcccaggcagtgtctgaaggtgactttgtgcagagggaggaagacgatatttctgcaccacgtgcttctgttgatcctgcccaatcattacatgatagcaatctttcaccacccacagtactacagtttgggaaaacaaggaaactatccgcggagcgagctgatcccagaaaccgacaactcctgcagaaacgtcagtttttccattctcacagggcacagccaatggcactggaacaagttttctcggatcgtgatagtgaagatgaagttgatgatgacatcgcagattttgaagatagacggatgcttgatgattttgttgatgtcacgaatgatgagaaacttattatgcatatgtggaattcatttgttcggaaacaaagggtgctagctgatggtcatattccttgggcctgtgaggcattctcccggcttcatggaaaacatcttgtacagaatcctcctctactatggagctggcgtttccttatgattaaactgtggaaccacagtctattagatgcccgtgccatgaatgtctgcggcacaattcttcaaggctaccaaaatgaaagctcggaccccaagaatatatgagttgagcatagtgcgctaattataatttaaatcaagtgggtatttggaggaggccgtaggagcaggttaaagaggtgaaagctgcacctaaggccatggaggaccattctcaattctatttaccgaccggtcgtatttacaaggactgttgttcgtcgtgttctgttccatgtataagcgcctttagtgtcgcataacttgtcgtatggtctgcaaacttgaatcagtgttgtcaagttctcttctttgctgtaatgaaacctatctgaaattatatcttgcgtaagcgtgtgcaaaatt

SEQ ID NO: 904 - DNA, 2448 bp, Hordeum vulgare
caatgcggttctaaatctctctccgccgcctcgccgtcgtcgccgcctcacggccggaacgtcgccgccactcacgcgcctcgacgccgccactcacgcgcctcgacgccgccgccatcgctatccctgctctctccacccgtccgcgagcttcgacatcggtctttgagtccccgccggttgatgccccttgttaaatccgcccgtccgcgaccctgaggcgctcggcggcggcgaggagatgcctggcctacctttacctgcccgggacgcagcggacactgggtgtgaatttagttaccctcagtctgcagaccagatgcgacaccaacagttgagagctcgattatctccagatgagcagcttgctgctgaagaaagtttcgcgttgtactgcaagccggttgagctatacaatatcattcaacggcgagccattaggaatcccgcttttctgcaaagatgccttcactacaagatacatgcaagccgaaaaaagaggattcagataactgtatcactatctcgaggtacaaataccgagttgccagaacagaatgtctttcctctttacgttctattagctacacctactactaatatttcacttgaagggcattctccgatatatcgattcagttgggcctgtttgcttacgtcttttagtgaatgtggtagtaaaggtcgcaccaaagctacattcacaattccagacatcaagaatttatctacctcccgagcttgcaaccttaacattatccttatcagctgtgtttcggaagggcaagttgaggaaaatgttggtgaacataactgctctgtgaaccatgtggaaggctctgctctccaaaagcttgaagggaaatgcttctggggtaaaataccaattgatctacttggttcgtctttggagaactgtgtaactttaaatttgggacatacagtggagttggcttctgcagttagtatgagcccaagtttcttagagccgaaatttatggagcaggacagttgcttgacattttgctctcataaggttgatgctacgggttcatatcaactccaagtaggaatatctgctcaagaggctggtgcaagagacatgtctgaatctccatatagtagttactcatacagtggtgtcccaccttcatcattaccacatatcataaggttgagagctggtaatgtgcttttcaacttcaagtactacaacaatactatgcaaaagactgaagtaactgaagattttgcctgccccttctgcttggtaaagtgtggaagctacaagggtttggggtgtcacttgaactcatcacatgacctattccactttgagttctggatatctgaagaatgccaggctgttaatgttagcctgaagactgatgtctggagaactgagcttgtggctgagggagttgatccaagacatcaaacgttttcctactcctcaaggtttaagaagcgtagaaggttgggaatgttgggaaccacagctgagaaaataagccatgtgcatccacatatcatggattcagattcacctgaagatgcccaggcagtgtctgaaggtgactttgtgcagagggaggaagacgatatttctgcaccacgtgcttctgttgatcctgcccaatcattacatgatagcaatctttcaccacccacagtactacagtttgggaaaacaaggaaactatccgcggagcgagctgatcccagaaaccgacaactcctgcagaaacgtcagtttttccattctcacagggcacagccaatggcactggaacaagttttctcggatcgtgatagtgaagatgaagttgatgatgacatcgcagattttgaagatagacggatgcttgatgattttgttgatgtcacgaatgatgagaaacttattatgcatatgtggaattcatttgttcggaaacaaagggtgctagctgatggtcatattccttgggcctgtgaggcattctcccggcttcatggaaaacatcttgtacagaatcctcctctactatggggctggcgtttccttatgattaaactgtggaaccacagtctattagatgcccgtgccatgaatgtctgcggcacaattcttcaaggctaccaaaatgaaagctcggaccccaagagtatatgagttgagcatagtgcgctaattataatttaaatcaagtgggtatttggaggaggccgtaggagcaggttaaagaggtgaaagctgcacctaaggccatggaggaccattctcaattctatttaccgaccggtcgtatttacaaggactgttgttcgtcgtgttctgttccatgtataagcgcctttagtgtcgcataacttgtcgtatggtctgcaaacttgaatcagtgttgtcaagttctcttctttgctgtaatgaaacctatctgaaattaaaaaaaaaaaaaaaaaaaa

SEQ ID NO: 905 - DNA, 2195 bp, Zea mays; identical to SEQ ID NO: 898

SEQ ID NO: 906 - DNA, 2073 bp, Zea mays; identical to SEQ ID NO: 897

SEQ ID NO: 907 - DNA, 1984 bp, Eulaliopsis binata; identical to SEQ ID NO: 896

SEQ ID NO: 908 - DNA, 2518 bp, Dendrocalamus latiflorus; identical to SEQ ID NO: 899

SEQ ID NO: 909 - DNA, 2101 bp, Triticum aestivum; identical to SEQ ID NO: 900

SEQ ID NO: 910 - DNA, 2320 bp, Oryza sativa Japonica Group; identical to SEQ ID NO: 901

SEQ ID NO: 911 - DNA, 1935 bp, Eulaliopsis binata; identical to SEQ ID NO: 902

SEQ ID NO: 912 - DNA, 2494 bp, Hordeum vulgare subsp. vulgare; identical to SEQ ID NO: 903

SEQ ID NO: 913 - DNA, 2448 bp, Hordeum vulgare; identical to SEQ ID NO: 904

SEQ ID NO: 914 - DNA, 2579 bp, Zea mays
caagcacatactgacacacacacacacacacaagcccattgcattcgccaaacattcgcccacgcgccattgtagcgcacgagctcccgaagccctcatcgccgtgccgttcgtctcgccggatcgatcgctccgcccctgctcctggctttggtgccgtatgcccgtccgtctccatagggcttgcattctctctgctttgatttgacggatcgcaggagttgacgagccgcacgccctagctcgtacgtgaaaaaaacgtggccacgtttcaggtgctgaaaccaagatggttaatttcggtaagaaattgatggcagaccagttggaggagtggcgagagtactatattaattataagatgatgaagaaaaaggtaaaacagtatgtacagcagacccaaactggtggaaaaaatcgtgaccaggttcttaaggagttctcaaggatgcttgatgatcagattgaaaagattgtgctatttcttctgcaacaacaaggtcatcttgctaggaggatcgagaatttaggagaacagcgtgtcgtgcttatggaacggtctgatgtatcccaaatttgtcaaatacgccaggcttacagggaagttggatatgatcttgtgaagctacttaggtttcttgattcgaacgctactggtatccggaagatacttaagaagttcgataagcgctttggctataagtttacagattattacgtctctactcgagcaaaccatccttattctcagctccagcagatcttcaagcaagtgggagtcgtggctgttgttggtgctttgtctcgcaacctttcttatctacaagatcatcaaggaagcctagcaaatatctatgattacccatcactcatcttgaaggatcccgtcatagaacaaataaatcactcagtacagaaactcacacactccacaagctttctgcaatttctagggcagcatgcacttatcgttccgggggatatgcagagcggctcagatctcggtgatgacaaggattaccatttcctgtcactgctgctgaacctagtaaacacgtttctgtacatggttaacacatacatcatcgttccaactgccgatgactattcagtaagcctcggagctgcagcgactgtttgcggtgtgattatcggatcaatggcagttgcacaaatcttctcctcggtatatttcagtgcctggtcgaacagatcgtacttcagacccctcgtatttagctgcatcatgttgtttctggggaacctattgtatgctttggcatacgatctgaattccctaactgttcttattgctggccggctactgtgcggtttgggttcggccagagccgtgaaccgccgctacatcagcgactgtgtacccctgaaaaccaggctgcaggcgtcggctgggtttgtcagcgctagcgctcttggaatggcatgtggtcccgctcttgccggtctgctgcagacaaagtttaagatttatgggcttacattcaatcagaacaccttgcctgggtgggtcatgtgccttgcttggattgcatatttgttctggctgtggatttcattcaaagagccgggccacattgccacagagaattcagtcagcacgcaatcatctgattctggccgtcgagtaagcggtaacttggagggtggcctcggagagcctttgctcatagacgcaaaggcagggcaggatgaggacgacgaggacaatgacgaccccgaagaatctcatacacctgccacatcgcttgctgcagcatacagattgctgacaccatctgtgaaggttcagctactgatctacttcatgctcaagttcgccatggaaatcctactctcggagtcgagtgtcgtgaccacgttctatttcaagtggacaactagtaccgtggcgatctttctggcagttcttggtctgacggttctcccagttaatgtcatcgttgggagctacgtcaccaacctgttccaggacaggcaaatcctggtggcctccgagatcatggtgttgatcggcatcgtcatgagcttctgcttcacccctcactactccgtcccccagtatgtcacgtcagctctcatcacgttcgtgttcgccgaggtgctcgaaggggtgaacttgtccctcctctcccgcgtgatgtcgtcgaggctctcccgcgggacctacaacggcgggctgctctcgacggaggccggcacgctggcccgcgttgccgctgacatgaccatcacggccgctggctatctggggcagggccgcctcctgaacgccaccctcctgccgtccttggtgatctgtctagcatctatcgtcgcgacgttctgcacttacaactcactctactgattaccggtcgatgaactcctctccctcttatacaagttgccgaattgcgtcttgcagtgacgctgaaaattttcgggctgctgctgctaatgtaaactgctgcggcctgcgggtggacgagcggtccatgtgtatcgacgcctgtagtgttgcgaacttgctacggctgtaacatgacacgtgcgcgttaaataaaatgccctactgaagt

SEQ ID NO: 915 - DNA, 2648 bp, Zea mays
ctgacacacacacacacacacaagcccattgcattcgccaaacattcgcccacgcgccattgtagcgcacgagctcccgaagccctcatcgccgtgccgttcgtctcgccggatcgatcgctccgcccctgctcctggctttggtgccgtatgcccgtccgtctccatagggcttgcattctctctgctttgatttgacggtacccagctgaagcacacaaattgcctccgtttgccggtcctgtgcgtgcgcgatcgagttttgttgatggtcatctagcaggatcgcaggagttgacgagccgcacgccctagctcgtacgtgaaaaaaacgtggccacgtttcaggtgctgaaaccaagatggttaatttcggtaagaaattgatggcagaccagttggaggagtggcgagagtactatattaattataagatgatgaagaaaaaggtaaaacagtatgtacagcagacccaaactggtggaaaaaatcgtgaccaggttcttaaggagttctcaaggatgcttgatgatcagattgaaaagattgtgctatttcttctgcaacaacaaggtcatcttgctaggaggatcgagaatttaggagaacagcgtgtcgtgcttatggaacggtctgatgtatcccaaatttgtcaaatacgccaggcttacagggaagttggatatgatcttgtgaagctacttaggtttcttgattcgaacgctactggtatccggaagatacttaagaagttcgataagcgctttggctataagtttacagattattacgtctctactcgagcaaaccatccttattctcagctccaacagatcttcaagcaagtgggagtcgtggctgttgttggtgctttgtctcgcaacctttcttatctacaagatcatcaaggaagcctagcaaatatctatgattacccatcactcatcttgaaggatcccgtcatagaacaaataaatcactcagtacagaaactcacacactccacaagctttctgcaatttctagggcagcatgcacttatcgttccgggggatatgcagagcggctcagatctcggtgatgacaaggattaccatttcctgtcactgctgctgaacctagtaaacacgtttctgtacatggttaacacatacatcatcgttccaactgccgatgactattcagtaagcctcggagctgcagcgactgtttgcggtgtgattatcggatcaatggcagttgcacaaatcttctcctcggtatatttcagtgcctggtcgaacagatcgtacttcagacccctcgtatttagctgcatcatgttgtttctggggaacctattgtatgctttggcatacgatctgaattccctaactgttcttattgctggccggctactgtgcggtttgggttcggccagagccgtgaaccgccgctacatcagcgactgtgtacccctgaaaaccaggctgcaggcgtcggctgggtttgtcagcgctagcgctcttggaatggcatgtggtcccgctcttgccggtctgctgcagacaaagtttaagatttatgggcttacattcaatcagaacaccttgcctgggtgggtcatgtgccttgcttggattgcatatttgttctggctgtggatttcattcaaagagccgggccacattgccacagagaattcagtcagcacgcaatcatctgattctggccgtcgagtaagcggtaacttggagggtggcctcggagagcctttgctcatagacgcaaaggcagggcaggatgaggacgacgaggacaatgacgaccccgaagaatctcatacacctgccacatcgcttgctgcagcatacagattgctgacaccatctgtgaaggttcagctactgatctacttcatgctcaagttcgccatggaaatcctactctcggagtcgagtgtcgtgaccacgttctatttcaagtggacaactagtaccgtggcgatctttctggcagttcttggtctgacggttctcccagttaatgtcatcgttgggagctacgtcaccaacctgttccaggacaggcaaatcctggtggcctccgagatcatggtgttgatcggcatcgtcatgagcttctgcttcacccctcactactccgtcccccagtatgtcacgtcagctctcatcacgttcgtgttcgccgaggtgctcgaaggggtgaacttgtccctcctctcccgcgtgatgtcgtcgaggctctcccgcgggacctacaacgtcgggctgctctcgacggaggccggcacgctggcccgcgttgccgctgacatgaccatcacggccgctggctatctggggcagggccgcctcctgaacgccaccctcctgccgtccttggtgatctgtctagcatctatcgtcgcgacgttctgcacttacaactcactctactgattaccggtcgatgaactcctctccctcttatacaagttgccgaattgcgtcttgcagtgacgctgaaaattttcgggctgctgctgctaatgtaaactgctgcggcctgcgggtggacgagcggtccatgtgtatcgacgcctgtagtgttgcgaacttgctacggctgtaacatgacacgtgcgcgttaaataaaatgccctactg

SEQ ID NO: 916 - DNA, 2603 bp, Hordeum vulgare subsp. vulgare
ggtagccgaccacacaagatacagccgaacccagccattgcattcgcgcatactggtacgcatacgcacgccattaccattgcgccgcgctcttccgaaatcccggcctcctcatccccttcccggtgcctcccgttcgcaagggatcactgtaggcgcgatcggttcgttgatggtcatctaaattcaggagattgcttcgccgaacaagggaagggaggagccgccgaagaacacgcggccgcgtttcaggtaggtagcgaaacgccaagatggttaattttgggaaggtactggtgtcggatcaattggaggagtggaaagaatactatattaattacaaaatgatgaagaaaaaggtaaaacagtatgttcagcagactcaaagtggtggaagaaatcatgaacaggttcttaaagagttctcgaggatgcttgatgagcagattgaaaaggttgtgctctttctactgaaacagcaaggtcatcttgctagcaggatcgagaaattgggacaacagcgtgccatacttacagaacattgcgatatatcacaagtttctcaagtgcgagaggcttataggcaagttggacttgatcttgtgaagctccttagatttgttgatatgaatgctactggcatccggaagattcttaagaagttcgataagcgcttcggctatcgatttacagattattatgtctcaactcgtgcaaatcatccttattctcagcttcaaccgatcttcaagcaagtgggtatcgtagctgttgctggtgctttgacgcgtaaccttgcatctctgcaagatcaccagggaagctttatatccatctatgatcatccatcaatcaccctgaaggaccctgtcatcgaacaaataaataattcagtacagaaactcacgaacagcacaaccttcctgaaattcctaggacagcacgcactgattgttccagaagacgtgcaaactagctcagaggatcttgtcgatgaccagagctaccatttcatgtcgctgatgctcaacctagtgaacacattcctctacatggtgaacacatacatcattgtgcctactgcagatgactattcggtgagccttggtgctgcggcgactgtttgcggtgtgattatcgggtcgatggcagttgcccaagtgttctcttcagtttattttagtgcctggtccaacaagtcgtactttagacccctcgtattcagcagcatcatgctgttttccgggaatctgctgtacgcgttggcgtatgatctgaattccttaactgttctcatagttggccggctgctctgcgggttgggttctgccagagccgtgaaccgtcggtatatcagcgactgtgtgcctctcaaaatccggctgaaagcctccgcaggattcgtcagtgctagtgcacttggaatggcatgcggtcctgcgctggctggcttgctgcagactgaattcaagatctatgaagtaacttttaatcagaacaccttgccagggtggatcatgtgctttgcttgggttgcgaatttggtttggctatggatttcattcaaagagccagatcactttgctcaagagaatgctctcagcacacagtcatctgaatctggccatggacgaagtgataatttggagagcggtttagcacagcctttgctcacagaggcaaaggagaggcggaatgaaaacgcagaggataacggcgacaatgaagaaggccgtaaagagagtcataaaccagcaacatcgattgctgcagcatacagattgctcacgccatccgtgaaggttcagttattgatctacttcatgctcaagtttgcaatggagattctactctccgaatctagtgtcgtcactacgttctattttaactggtccacgagcaccgtggccatctttctagctgttctcgggctgacggttcttccggttaatgtcattgttggaagctatatcaccaacctgtttcaggacaggcaaatcttggtggcgtctgagatcatggtcctgatcggcatcgcctcgagcttccacttcagctccagctactgcgtcgcacagtacgtcgtgtcggccctcatcacgtttgtattcgccgaggttcttgaaggggtcaacctgtccctcctctcccgggtgatgtcgtcgaggctctcccggggcacctacaacggcgggctcctctcgacggaggccgggacgctggcccgcgtcgccgcggacatgacgatcaccgccgcggggtacctggggcagagccagctcctgaacgccaccctgctcccgtccctggtcatctgcgtagcctccatcgccgcgacgttcggcacttacaacaccctgtactgacaaacggcgccccacgatgcacttgaagctaagcatggaccaatatgcgcggcgaggccaagctgctagtcgaagctttgtggcgtcgctgtaaatgttaggccctcgctgccagtgcgaggtgctgcgtttgtggtgtaccgtgtatggaagcttgtggtatcaaactagcaaatgttgtagcagacacacggttctaataaagccgtactgatccatccaatgcttttttagaac

SEQ ID NO: 917 - DNA, 2705 bp, Oryza sativa Japonica Group
acccctccctcagcttcccttcccatctgcccgtcttcttcttcttcctcctcctcctgccctacccgcggccgcgcgatataaatacatcaccctccccatccgcctctccgccagcaaaccagcacagccgtacgccgccggcaactgcgttcgcgcgagcgcctgtccgcgttgtacatatttgtgagtaatccgtcacctctgtacgcagcacgcacatgccgccgccaaagcgcagatgattccagtctttccctacttttgaatctgtgcctgatgaatctgcgtcgtcgtgctgtagcactagcgagtgtttcccttgcgacgtagagtttgctgatgttcatctaattagcccggaggactcgggaatcagaattcaccgtggtgtcagggagaaaaagtggatcgaacttcggatcacctggtaccatttgtttacgatacaggtattgaacgacaagatggttaattttggaaagaagttgatggctgatcaagtagaagaatggaaaggatactatattaactacaaattgatgaagaaaatgttgaagcaatacgttcagcagacccaacttggtggaaaagatcgagagcaagtacttaaagagttctcaagaattcttgatgaacagattgaaaggattgtactttttctgctacaacaacaaggccaccttgctaataggattgaggaattgggagaacagcgtgctgctcttctagaacagcatgatatatcccaagtttttcaactacgagaggcttatagagaagttgggcgagatcttataaagcttctccgttttgttgatatgaatgctactggtataaggaagattctaaagaaattcgataagcgctttggctataggtttacagactattatgtcaccactcgtgcaaaccatccttattctcagcttcaacaagtctttaagcaagtggggattgtagctgttgtaggagctttatcgcgcaaccttgcatatctgcaagatcatgaaggaagtgttttgtccatctatgatcatccatcagttaccttaaaggaccctatcatagaccaagtaaatcatgcggtacaaaaacttacacatgcgacgagttttctgcaattcttaggtcaacatgcacttatcatccaagaggacgtgcaaagtgggtcggaggatcttgtcgatgatcaaagttaccatttcatgtctttgatactcaacctagtgaacacctttctttacatggtgaacacatatatcattgtgccaactgctgatgactacgctgtaagccttggagctgcagcgacagtttgtggcgtaatcatcggatcaatggcagttgctcaagtgttctcctcagtttatttcagtgcatggtcaaataggtcatacttcagacctcttgtattcagtagcatcatgttattcgctgggaatctgctatatgcattagcatatgacctgaattctctgacagttctcctgattggccggctactatgcgggttaggctctgcaagagctgtgaaccgtcgatatatcagcgattgtgtgcctctcaaaatcaggctacaggcctctgcaggattcgtcagtgctagtgctcttggcatggcatgtggccctgctcttgctggtttactccagacaagatttaagatatactcactcacttttgatcagagcacgttgcctgggtgggtcatgtgcattgcttggcttgtttacttgctgtggctgtggatatcattcaaagagccgggacactttgctaagagttcagacacggcacagcctgctgaatctggccatcaagtcaatgctaatctggaggaaggtctagcgcaaccattgcttacaggctcagaagagggacaagaccaaaatgctgaggataatgacgataacgaagaggagtctaaaaattctcacgggccagcaacttcaatcagttcagcatacaaattgttgacaccatctgtgaaggtccagctattgatatactttatgctcaagtacgctatggaaatcttgctctctgaatcaagtgtcatcaccacatactattttaactggtctacaagcgctgtggctatctttttagcgattcttgggtgtactgttctccctgtcaacgccattgttggaagctacattacaaatttattcgaggacaggcaaattttggtggcatctgaaatcatggtcctcattggtataatcatgagcttccgttacacccctcactactccgttccgcagtacgtcttgtccgctctcatcacatttgtgtttgctgaggtcctcgaaggagtgaacctgtcgttgctttcacgagtaatgtcgtcgaggctcgcgcgaggaacctacaacggcggcctcctgtcgacagaggccgggacgctggcccgtgtagttgcagacgcgacgattaccgcggcgggttatctaggcccggacctcctgctcaacatcactctgctgccacctcttgtcatctgcatagcctccctcgttgcaacattctgcacatacaacaccctgtactaaggaagttgcctctctctgcacactgtagagccggttaaactttattcatgctcacattgggttgtattttacatgtatctgcatgcggtagcattctttgtttgtacaagtccttaaacagttcaataaaatgttcttctgtaaatc

SEQ ID NO: 918 - DNA, 3894 bp, Oryza sativa Indica Group
ttaattttggaaagaagttgatggctgatcaagtagaagaatggaaagggtatgcttttggtacttattttttatgaacaaaataattttcttcattgattacacactactatgtaaaaaaaattatatgccttcctattatgatacctaaaaatgaaacagaagttgagtacccatcaaactattacgtcaatctataatgatttttttaatgaactatgatgaaatttgaaggttatgatgtggactccataagcaattttcacaagccagttcctccatattaacaaatttcctgcagaaatcttatgatttcctcatcttgatattactagatactatattaactacaaattgatgaagaaaatgttgaagcaatacgttcagcagacccaacttggtggaaaagatcgagagcaagtacttaaagagttctcaagaattcttgatgaacaggtatatatgcaaacatttctttttttaattaattataaagatatattattggatcaacttgtttatttcatctattgttggtttaataaagaactcgtgtttcttaaaatggtatcattgttttgattagctaaaattcatacttgctgtttcacttcagattgaaaggattgtactttttctgctacaacaacaaggccaccttgctaataggattgaggaattgggagaacagcgtgctgctcttctagaacagcatgatatatcccaagtttttcaactacgagaggcttatagagaagttgggcgagatcttataaagcttctccgttttgttgatatgaatgctactggtataaggaagattctaaagaaattcgataagcgctttggctataggtttaccgactattatgtcaccactcgtgcaaaccatccttattctcagcttcaacaagtctttaagcaagtggtaatttttctggcattttacatgattagggacacttgattttcttctgtctctcacagctaaccagcattccttttgtccacttctaccaatgcaggggattgtagctgttgtaggagctttatcgcgcaaccttgcatatctgcaagatcatgaaggaagtgttttgtccatctatgatcatccatcagttaccttaaaggttttatgtcttgactgttacattatctgaatttggaactagttttctacatatcttttgcatgatgtaagagtgtaatgtgactattttctgatattcaggaccctatcatagaccaagtaaatcatgcggtacaaaaacttacacatgcgacgagttttctgcaattcttaggtcaacatgcacttatcatccaagaggacgtgcaaagtgggtcggaggatcttgtcgatgatcaaagttaccatttcatgtctttgatactcaacctagtgaacacctttctttacatggtgaacacatatatcattgtgccaactgctgatgactacgctgtaagccttggagctgcagcgacagtttgtggcgtaatcatcggatcaatggcagttgctcaagtgttctcctcagtttatttcagtgcatggtcaaataggtcatacttcagacctcttgtattcagtagcatcatgttattcgctgggaatctgctatatgcattagcatatgacctgaattctctgacagttctcctgattggccggctactatgcgggtacgtagaatttatttttctatttgttttaaaccctattactcagtacctcttgctaatgaattataatcatgttgaggtaggactacaatttagtatggtaaatattgctggctcttaatatttaccaccaaccctgtttgtcttcttctcgattattcatcagtatttctggattgaaatttactgatcataatacaatactcatatgcaggttaggctctgcaagagctgtgaaccgtcgatatatcagcgattgtgtgcctctcaaaatcaggctacaggcctctgcaggattcgtcagtgctagtgctcttggcatggcatgtggccctgctcttgctggtttactccagacaagatttaagatatactcactcacttttgatcagagcacgttgcctgtgtgggtcatgtgcattgcttggcttgtttacttgctgtggctgtggatatcattcacagagccgggacactttgctaagagttcagacactgcacagcctgctgaatctggtaagttctcaacccacaggaagagtgactagcaaatatattccttccgaaaactaaacacaacatgattctgttgatttggaagtgcaaatgttgcctgtaaagaattttttttatcagcatcaggatttttgttttctaatatagagttattttttgattaaaaataggccatcaagtcaatgctaatctggaggaaggtctagcgcaaccattgcttacaggctcagaagagggacaagaccaaaatgctgaggataatgacgataacgaagaggagtctaaaaattctcacgggccagcaacttcaatcagttcagcatacaaattgttgacaccatctgtgaaggtttcctcctttcccctcgtcaacttcttttcttttattccagatcaacgttgcagcatacacgaaaaacaagttcacaaactaatcaagttgggttcttataactataaatgaactgcagaacataaaatgaagagaagtatctcggtgtcagcatcttactgtccacaacaatagtagctatgctgcggttgtatttacacttccaaaaatacaatttcaagaaaaaaaaagttcttcattagcattacttcgattgctttttttcaagctattggttagctttataatatatttaattaagccctataagcaataaatcgtctgtcatttcatctctttcaaactaggcctaatactgacacatgagtgctccgcactgtcaagattactctcaactctcatgttaagtttattttttatccgttggatgcatcatctttctatgttttgttttgcaatacattacatggacgctcatttctcaggtccagctattgatatactttatgctcaagtacgctatggaaatcttgctctctgaatcaagtgtcatcaccacatactattttaactggtctacaagcgctgtggctatctttttagcgattcttgggtgtactgttctccctgtcaacgccattgttggaagctacattacaaatttattcgaggacaggtaatttttatgctcgttaagtgcactttgtatccctcgcccaaaaaaaggattttgaaggtctaaataaagtccattcaaaatgatttcatgaaagcatgtaattaagggtattgttaacggctgctttgtacatggtattttgcaggcaaattttggtggcatctgaaatcatggtcctcattggtataatcatgagcttccgttacacccctcactactccgttccgcagtacgtcttgtccgctctcatcacatttgtgtttgctgaggtcctcgaaggtatgtaaacgcaaccacctcaaaatgatcgttcatcacacagcccttcagcagcatgacatctgacggcacaaagcgagatctgaatcaagcaaacgcatgctgttgctttaaccaccgttttccatttctgacgaacattgcaggagtgaacctgtcgttgctttcacgagtaatgtcgtcgaggctcgcgcgaggaacctacaacggcggcctcctgtcgacagaggccgggacgctggcccgtgtagttgcagacgcgacgattaccgcggcgggttatctaggcccggacctcctgctcaacatcactctgctgccacctcttgtcatctgcatagcctccctcgttgcaacattctgcacatacaacaccctgtac

SEQ ID NO: 919 - DNA, 2795 bp, Vitis vinifera
gagactgttccgaagaaagctcgtctgagttctaccatttttatctctctgcaaattcgtagattcaataaatagatttccaccgttcggttttcgcaaatccaatctgagcagaacaggctgctgtgcttacctttgattccggtttgtgtgaatttcgaaattcggtttgtgtccgaatctccaaagatccgatttccgtgtagtacagagattccgtgctttttcgatctcgcgtcgttttatcggtgatttaattctggccttggtctcctgttttattttttgaggctttacgctttggatgcgtcattgtttacgtgttcgttgatggtcatctaagtttcttccgacgcgataattgacattcgagcgaaggtcttgaaatcgtctttggtgagagatggttgcctttgggaaaaagctgaaagaaagacaaatccaggaatggcaagggtattacatcaactacaaattgatgaagaagaaagtaaaacaatatgttcaacaaattgaaggtggagcacaaaatcgccgtcatgttcttaaggacttctctagaatgctggatactcagattgaaaagattgtcctctttctgttggaacaacaagggctactagcaagcaggatagccaagcttggagaacaacatgatgctcttcagcagcagccagatatttctcaaatatctgaactacgagaagcttatagagcagtgggacgagatctgttaaagcttcttttttttgttgagataaatgctattggtttgcgaaagatcctgaagaagtttgataaacgctttggctatagattcactgattactatgttaaaacccgtgctaatcatccttattcccagttgcagcaagtgttcaagcatgtgggagtaggggctgttgtgggagccatatctcgcaatcttggagatcttcaggaccgtcaaggaagctacttatcaatttatgatcaacctgcccttcctctccaggatcctgtgattgattcaataaaagcagccgtagacaggttaacacactcaacaaacttccttcactttttggcccaacatgcacttattatgcaagaagagttacctactgctgttgaggagcatgtagacgatcagagataccattttatgtcacttctgttaaacttggcaaatacatttctttatatggtcaatacgtatattgttgtcccaacagcggataactactccatgagtcttggagctgcagcaacagtttgtggtgttgtgattggggcaatggctgttgctcaagtgttctcttcagtgtattttagtgcttggtcaaataaatcatactacagacctcttatattcagcagtattgttctctttgtgggaaataccatgtatgcactggcttatgaccttgattcaatagtggttctcctacttggtcgtcttttctgtggattgggctctgctagagctgttaatcgacggtatatcagtgattgtgtaccactaaaaattcgcatgcaggcttctgcaggttttgttagtgccagtgctcttggaatggcatgtggtcctgctcttgctggattgcttcaaattaatttcaagatctacaagatcacatttaacgaagacactttgcctggttgggttatggctgtggcatggctggtttatttaatttggctatggatctcatttaaagagcctgttcgcgagacccaagagagcaatattcagcaggaatctaatgctgaaccagtagagaatgatgcacttgaaaagggtcttgctcaaccattgctcttaagttcagaagacaagcaagaagatgaagatggtgaccaagacaatgatgtgagtgaagaagctcctgaggagtctcgtgggccagccacttctattggttcagcatatagattacttactccctctgtaaaggttcaactattgatttatttcatgctcaaatatgcaatggagattttactctcagaatctagtgttgttaccacatattacttcaattggtccacgagcacagtggcaatctttcttgcatgtcttggcctaacagttcttccagtaaacattgctgttggaagctacataagcaacatgtttgaggataggcaaattttactggcatctgaaataatggttctcattggcatactcctaagcttcaacataataattccatactctgttccacaatatgtctgctcaggactcatcatgtttgtttctgctgaagtccttgaaggtgtcaatctggcactcctctctcgggttatgtcatcaaggctttctcgtggaacctacaatggtggactgctttcaactgaagctgggacaatcgctcgagtaattgcagatggcacaataaccttggttggttacttgggtgagagtaagctactgaatatcaccctacttccttcacttctcatctgcatatcctccatcattgctaccttctttacctacaactctctctattaattcatttctcttgcatcaaaagatgtagtgtctccaaatccattccatttccctcagtatttctcaggtattctttgctatataatttttcttttcttttctgtttggtcctgtatgcatgctgtataatatgcgaaaactagctccttaattcccaattggattttcataattttttgagccttcagtgaagaggtcctctgtattgcaagttcagcaaccttttccattcttttgttgttgattcaaagtatatcatcaattactaatacatcctgccccttctagttgaatt

SEQ ID NO: 920 - DNA, 1995 bp, Zea mays
caaggactcctgcctccgatgcggcaactcatcccatccggcttctaaagccgcggcccctgtggtcaattccggtggccggcggcatggattccggcgccaacagcatcggcgagtcggtgggcgagtcgccgtcgctggcgctggcgccggagccgcagacacggccggccgagccggtcaccaagggtcgcgggctccgccggtggcgccgtatcccgcgcgagcagcaccaggaggggtctccgggtagccccggggccgataccggcgttggagctagcgcgggtgaggacttggcggcgcagctccacaagcgtcgttacggtcctgccgccgacgagcccaagggaaagcaggacccggctgcagcagaggaggtcgagagctcggtcgcgtccgtggagtccagcttcgtgccgctggaggcgtccccaccgccggcgccgactaggttggacccgaatctaggccacctgattgccaccgctggtttctcggtgggcgccggcggcgccgattcggacaacagcgacgaccgcaccagcaagttgtccacggccgccagcgcgccgcgccacgacttctcgtccgtcggcttcggccgggagcgcgacagggcgcggtcccgcgcccccggcgctgctcacggcaagggcatccgtgctgcacgtgtgcgcggcgccactatgcgtgttgcctcttcccctgctgaagcggggaattctcgctccagcgtcgagtccaacctccggagctctaacgctgctcatgcgcggcgatctagtgctggcgtcacaagcaacggtgttcacaagattctgttccctgatggtcatcaaagtgacgatgaacctccaagtggggacatgcggtatggtacaggacgtttctacaaggagaatgggagtatagaagggagattggggaactgtgactccgactccaaccatcatacctttgatgaagcgagcgtgggcaagtttgagaatggagggactcattcaggtttggatctgtatggtgagtcgatggcgttacttcagtcggcacaagaagcgcttgagaatgagatccaaaagtttgtggaaatcaggaaagaaactgacgaagattccacagctcaccaaagtgaaatcgaatggagcagctcacctgtagaagaactaaatgagaagataaagatgctcgaattgaaactggaagaggccaccatgctcatcaatgagcgggattcagaaatacttgaactagatgcactcagccatgtacaaccacagaatacagtagcatgtaacaactatccgctgtccctacagtctgatgtagaccggctgttcctggagaagatggaagcagagattcagtgctttatccttacaagagcttctcaggactggaaactcctgacaatggatcaatttgctcttaacgaggcacagaaatcccttctgtcggatcacaaatccctagaaactaaactgaggcacgccgagaacagggcgatgatgctggaggagatggtggataaactagagtcgcaatgcaaggcgctgtctgagacttcagaagttctgaagctgcaggccggagctagcagggcctctttgttctgctcgatccagtttgtgctgctgtgcatagccattgggaccctcctcgttcgcttcctgtcctcttctccggagattgtacctacttgaggttagagaattatgccagtcagcctttatgtaggcgttgttgaacggttgtttactgtaacttattagggcatcaatcgccttacagattttcgttttttgtaccatcaactcgattttgctagtaatttctttatgaatacgagtttactccacttctgggttctctggattctggaaatgccacatgtgtagttttttttctatggtcggtataatgttcgaaagggaatctcgtcaccttggtggtttatgctgagagatctgtcatgatgctttatgtgttgtttgc

SEQ ID NO: 921 - DNA, 1869 bp, Zea mays
ccaagggctcgccccgatcccaaggactcgtgcctctcgtcctccgatgtggcaactcatcccatccggcttctaaagccgcggccaaggttgtcaattccggtggcaggcggcatggattccggcgccaacagcgtcggcgagtcggtgggcgagtcgccggtgcccgcgccggcgcctcagacacggccagccgaaccggtcacaaagggccgcgggctccgccggtggcgtcgtatcccgcgcgagcagcaccacgaggggtctccggtgagccccgggctcggtaacagtgctggtgctagcgcgggtgaggacttggcagcgcagctccacaagcgtcgttacggtcctgccgacgacaagcccaagggaaagcaggacgcggctgcagaggaggtggagagctcggtcgcgtccgtgaagtcaagcttcgtgccgctggaggtgtccccacctccgccgccgacgctgactaggttggacccgaatctgggccacctgattgccaccaccggtttctcggtgggagccggcggcgccgattcggacaacagcgatgaccgcaccagcaagtcttccacggccgccagcgcgccgcgccacgacttctcgtctgtcggcttcggccgggagcgcgacagggcgcgatcccgcgcccccagcgctgctcacggcaagagcatccgtgctgcacgtgtgcgcggcgcctcctccacggctgaagcagaccattctcgctccagcgtcgagtccaacctccgaagctctaacgctgctcatgcgcggcgatctattaccgacgtcacaagcaacggtgttcacaaggttctattccctgatggtcaacaaagtgacgacgaacctccaagtgctggcctgcggtatgctacaggaggtgtctgcaaggagaatgggagtgtagtagggatattggggaactgtgacactggttccaacaatcatacctttgatgaagcgagtgtgggcaagtttgagaatggagagactcattcatacttggatccgtatgttgagtcgatggcactgcttcagtcggcacaagaagcgcttgagaatgagatccaaaagtttgtggaaatcaggaaagaaactgatgaagattccacaattcaccaaagtgaaatagaatggagcagctcacctgtagaagagttaaatgagaagataaagatgctcgagtggaagctggaagaagccaccatgctcatcaaggagcgagattcaaaaatacttgaactagatgcactcagccaagtacaaccacatgataccatagcatgtaacgatgatctgctgtctttacagtctgatgcagaccaactgctcttggagaagatggaggcagagattcagtgttttatcctgacaagagcttcgcacgattggaaactcctggccaagaatcaatttgctcttaacgaggcacagaaatcccttctgacggatcacaaatccttagaaaccaaattgcggcatgccgagaacagggcgatgatgctggaggatatggtggataaactagactcgcaatgcaaggagctgtctgagatttcagaagttctgaagctgcaggccagagctagcagagcctccttgttctgctcggtccagtttatactgctatgcatagccatcgggaccatcctcgttcgcttcctgccgccttctccggagattgtacctacttgaggttagagaattaggccaatcagcccagcctttgattaggcattgttgcaatattgttcactgttacttgttaggcatcaatcgccttacaaattttcgtctttgtaccatcaactcgattttgctagtaacttcttatgaatatgaatttactgt

SEQ ID NO: 922 - DNA, 1991 bp, Zea mays
aggtttgtttactgatagtctgatactgtctgtttcctcttgccttccactccctggatctccagttccaggctaggcccgagctggggaattccgatccccccaccaagggctcgccccgatcccaaggactcgtgcctctcgccctccgatgtggcaactcatcccatccggcttctaaagccgcggccaaggttgtcaattccggtggcaggcggcatggattccggcgccaacagcgtcggcgagtcggtgggcgagtcgccggtggccgcgccggcgcctcagacacggccagccgaaccggtcacaaagggccgcgggctccgccggtggcgtcgtatcccgcgcgagcagcaccacgaggggtctccggtgagccccgggctcggtaacagtgctggagctagcgcgggtgaggacttggcagcgcagctccacaagcgtcgttacggtcctgccgacgacaagcccaagggaaagcaggacgcggctgcagaggaggtggagagctcggtcgcgtccgtgaagtcaagcttcgtgccgctggaggcgtccccacctccgccgccgacgctgactaggttggacccgaatctgggccacctgattgccaccaccggtttctcggtgggagccggcggcgccgattcggacaacagcgatgaccgcaccagcaagtcttccacggccgccagcgcgccgcgccacgacttctcgtctgtcggcttcggccgggagcgcgacagggcgcgatcccgcgcccccagcgctgctcacggcaagagcatccgtgctgcacgtgtgcgcggcgcctcctccacggctgaagcagacaattctcgctccagcgtcgagtccaacctccgaagctctaacgctgctcatgcgcggcgatctattaccgacgtcacaagcaacggtgttcacaaggttctattccctgatggtcaacaaagtgacgacgaatctccaagtgcaggcctgcggtatgctacaggaggtgtctgcaaggagaatgggagtgtagtagggatattggggaactgtgacactggttccaacaatcatacctttgatgaagcgagtgtgggcaagtttgagaatggagagactcattcatatttggatccgtatgttgagtcgatggcactgcttcagtcggcacaagaagcgcttgagaatgagatccaaaagtttgtggaaatcaggaaagaaactgatgaagattccacaattcaccaaagtgaaatagaatggagcagctcacctgtagaagagttaaatgagaagataaagatgcttgagtggaagctggaagaagccaccatgctcatcaaggagcgagattcaaaaatacttgaactagatgcactcagccaagtacaaccacatgataccatagcatgtaacgatgatctgctgtctttacagtctgatgcagaccaactgctcttggagaagatggaggcagagattcagtgttttatcctgacaagagcttcgcacgattggaaactcctggccaagaatcaatttgctcttaacgaggcacagaaatcctttctgacggatcacaaatccttagaaaccaaattgcggcatgccgagaacagggcgatgatgctggaggatatggtggataaactagactcgcaatgcaaggagctgtctgagatttcagaagttctgaagctgcaggccagagctagcagagcctccttgttcttctcggtccagtttgtactgctatgcatagccatcgggaccatcctcgttcgcttcctgccgtcttctccggagattgtacctacttgaggttagagaattaggccaatcagcccagcctttgattaggcattgttgcaagattgttcactgttacttgttaggcatcaatcgccttacaaatttccatctttgtaccatcaactcgattttgctagtaacttctttatgaatatgaatttactgtaaaaaaaaaaaaaaaa

SEQ ID NO: 923 - DNA, 2607 bp, Zea mays
ccggcgcaaaaaagaagaagccggccaccgccgccgccgccgccgccgcaaagccgccgcccgcctcggttgagctgaaggcaacgccgtcctcgtcttctttacccgcggcgaacggtgcggcgccccaccaggtggtggacgcgggcgtcctcttgcgccgcgcacacgagctcaaggaggagggcaaccgcctgtttcagtcgcgcgactacgccggggcgctgcgccaatacgagctggcgctccgcctcgccccgcgcggccatcccgaccgcgccgtcttccacagcaatcgcgcggcatgcctcctccagctccgccccgtagaccacgaggccgtcgcgcaggagtgctccctcgcgctccaggccgagccacgctttccgcgcgctctcctccgccgcgcccgcgcgctcgaggcgctcggccgccacgagctcgccctcgccgacgcgctggcgctccttgcgctcgaccctgaccaccgcgaagccatcgacctctcctaccgactacgctcccgtgtcaacgcatcctctgctgcctccgcttcctcggcacccgagcccaccagccggccctcccccgctgcccttggtgcctccgccgttgtcgccggacttggccattccctccccgctcgctcattccctaagaaacaaccaccaccagcctctcctgctaacttgcagccaaatctcgcagtgattccaaaatctaacccgccaccgttgcccaagctggtgcctttctccaattctccgccatcttcaaccaagcctttggctgcagatagctccgagaaggccatgacgcctccagttgcctctttgctaccggaaagagcggcaccacttataaataaaaaggttgtgacgagatggaggcctctcaagctggtgtatgaccacgacattaggcttgggcaggttccagagaaatgcagcttccgaacacttcgtgagtttgtagctaagaggttcccatcatccaaggcagtgttgattaaatataaggatgctgatggtgatctagttaccatcacatcaacagaagagctccggttagctgaattattcattgataaagttggccacgaggttgtagaaaatgggagggaggatgacaataagctcccggtgttgaggctgcaccttgttgaagttagcccagaacaggaaccaactttgccattggaagaagagaagttggaggaggatgaggaattgttgatcaatggtgaagatagcactttacatgctttagcagtggtaaccgacgcagaggtggtgaagcaagatgttgagaacagatctgctgatcaaagtgtggagacagggaagaatgattgtggccatgccgagtgcaaggaagctgagattgatgattggttgcttcagtttgcagatttgttccggaaccaggttgggattgatgcagatgcacatttagacctgcatgagttgggcatggagctgtgctccgaggctctcgaggaaactgtgacaagcatggaggctcaggtcctttttgagttggctgcttctaaatttcaggaggttgctgctttggccttattcaattggggaaatgtgcacatgtgtgaagcaaggaagcgcatccctctcgatgaatctgctccaaaggaagtcatggctgctcagctccgcacagcttattattgggtgaaggagaggtatgctcttgcagggcacaaatatgaggaggcccttaaaatcaagccagacttccatgaagggcttcttgctttaggccagcaacacttcgagactgcaaagcttcattggtcatatgcactggcagataaggctgacctatctacctgggattctttggaaacattcaagctttttgatagcgctgagcagaacatgagggctgcaacagagatgtgggagaaggtggaagaacagagaatggcagagttaaaagaaccaggcgcatgtgataaggatggggtactgaggaaaaggcagcacggtgcaggtggtcaaccggagttgacaccagaagaagcagctgagcaggcagcagtaatgaggcaacagattcacctcttctggggtaatatgcttttcgagcgttcccaagtggagtttaagctcagtgttggtgactggaagacaaatcttgatgcatctgttgaaaggtttaagttggctggagcttcagaatcagatattttgacagtgttgaaaaatcacttttctaatgtagcctctgagtgtgaagagaagaaagtcatgacttcaggcacagaaatttcccaaacaaatgacaatgttgaggataagtgtgtggttgaaacctaagttttcatggttcaaggtgaatgacatcaatgtgtatcatattcatcaattgcttgataggctttatttgttcttggtattatcatggtcctttgtcattacatctaggcgagagcttcaagcacactgagttttgtgattgccattgccaactggtgcagagtcgacatgctccatgaaatcttgataatttactagaggtcttagatttctgaatatatgttatcattcttctaccagttttagtggtatttgatgttgagttagtttt

SEQ ID NO: 924 - DNA, 2491 bp, Oryza sativa Japonica Group
tgggcaaatccggcgcaaaaaagaagaaacccgccgccgccgcctccgcctccgccgccgccaccaaatcatctcccgccgcaacagagccgaaggcaccgacgcagtcccagccccccgcggccaacggggcggcgccgcatctggtggaccccgccgtgctcctgcgccgcgcgcacgagctcaaggaggaaggcaaccgcctgttccagtcccgcgactacggcggcgcgctgcggcagtacgagctcgctctccgcctcgccccgcgcggccaccccgaccgcgccgtcttccacagcaaccgcgccgcctgcctcctccagctccgccccgtcgaccacaaggccgtcgccgaggagtgctccctcgctctccaggcggagccgctcttcccgcgcgcgctccttcgccgcgcccgcgcgctcgaggcgctcggtcgccacgagctcgcgcttaccgacgcccttgccctcctcgctctcgaccccgaccaccaggacgccgtcgacctcgtccaccgcctccgctcccgcattctatccccgtcctcctcagcctcaggctctgccacctccacccccgaaccaactagccgcccctcccctgctgctcttggtgcctccgctgttgttgccggcctaggcccgtccctccccgctcgccctttccccaagaaaccatcacctcctcctccgcctgctcaacaacagcaatcggttcctccaatgtcaaaatttaatccgtcgccaccatcgcccaagttggtgcctttctccaactctccgccatcttctgccaacgcatcagctgctgagagctcccagaaggtcacgccgacacctctggttccctcttcactttcgttgaaagacaaagcgctgatggacaagaaggttgtcacaagatcaaggccgctcaagctggtgtacgatcatgatataaggcttgcgcagatgccagaaaaatgcagcttccgaacactccgtgaagttgtggcatcacgattcccatcgtccaaggctgtgctgattaagtataaggatgctgatggtgatctggttaccattacttgttccgcagaacttcgattggccgagtcctgtgttgatatagctggcagtgaggtgatagaagatggtgcacggcatggtcagaaacttccaatgttgagacttcacattgttgaagtaagcccagatcaggagcctccaatgccaacagaagaggagaagctggagcaggataatgagttgctggtgaaaggtgaagataactctccacatgcttcagcagctgtggtgactgatgcagaggtgacgaaacaagatgtggagaatgtagttgctgaagctgaacagaacaccctgacagggaagaaagattgtggccatgctgagtgcaaggaagctgaaattgatgattggcttcttcagttcgcagatttattccggaaccaggttggtgttgatgcagatgcacatctggacctgcatgaactgggaatggagctgtgctctgaggcgcttgaggaaacggttacaagtgaggaggcacaagccctctttgagatggctgcagctaaattccaagaggttgctgctttggccctattcaactggggaaatgtgcacatgtgtgccgcaaggaaacgcattcccctagatgaatcggctccaaagaaagtcatgtcagctcagctctgcacagcttatgattgggtgcgagataggtatgctcttgcagggagcaagtacgaggaggctcttaaaatcaagccggacttttatgaagggctacttgctttaggccagcaacattttgagactgcaaagcttcattggtcatttgcactagcagacaaggttgacctgtctgcttgggattcttcacagacattcaagctttttgacagtgctgagcacaagatgagggctgcaacagaaatgtgggagaaagtagaagagcaaagaatggcagaattaaaagaaccatctagcgaggcactgaagaaaaggaagaagcaacataatgcagatggtcaaggggagttgactccagaggaggcagctgagcaggcagcagtaatgaggcagcaaattcacctgttctggggtaatatgctttttgagcgttctcaagtggaattcaaacttgatatcgctgattggaagaagaatcttgatgcgtccattgaaaggtttaagttggctggagcgtcagaatcagatatctctgcagtcttgaagaaccatttttccaacacagtttctgagtgtgaagataagaaaatcatgactttagatacaggaatctcccaaataagtaacaatattgaggacaagtgtatccttgaaagctaggttttcatggttttaagttggataacatccatgcccatattcttatctgttcttgataatattttcctgatgttgttttatgacctcctaattagggattacagcacaatgaattttccgttacctgc

SEQ ID NO: 925 - DNA, 1282 bp, Zea mays
cccaacgccgtgctccgtcgtcgtctccgcccccagagtgatcgagcccactgacctggcccccgagcctcagctcgtgagtccggcaccgcgcctcgccatggccatggtgcagccggcggacacggccgtcaaggccaacgagatcctggcgcggttccggcccatcgcgcccaagcccacactggcagcagccgccgccgccgccgcggcgcccgtggcgcaggccgcggccgagggcgtcgtggccgcgaaccgcgtgctgtgccatctgcagagcaggccgtgccgcgcgcgcaagcgcggccgccccaccgtcgtgccggtgtcgcccaagtcgggcgcgcagccgcccgcgaagcggaggagagcctctacgccgtacccgcctctccggtgcgcggcggcgaccacgggggcgcatgtgtccgcggtcgtcccaggcagtgcgcgtctcccaccggcgagtgcgggtgtcgaagacatcgcgaaggcggcggcggcggcggcgacagaggaggggagggacgtccccgtggagcgcgacctgctgcggaagctgctggagcccagggtcatatcgccgcgggcggtgcgcccggtgtggtctgccatccacgtcgggtgcatccaccgcaccgacgacgcggcctgcaccgacgccgccgtctcgaagacggcggttcaggtggaggcggagctggaggtcgacgcgctcccggcggtggtctccgactcaggcaaccgcgtccggctcgtgaacgacgcgtacaaggagatggtggggcagcccgagtgcccgtggctcgacgccgtggctgccacgtcgaggaggatcagcggggaggtggcgctggtggtagcggaccggtcctctctgccggactcgtacggggcgttcacatgcacggcaaagatcgagtgggaggacgacgggaaggtcacctccatcgctgcaccctgcgacgtcagccggctgcagtgcgagtccagggattacctcttcgcctggaggttccgcaccgccgccgccgacgccgacgcatccgttggacacagctccgaggagattagtgagagttagggaagcttgagctgcatccaatgaaaccaagtgcatagactaagccgctagctgcatgttaaaactgagcagcttcctctttcgcgaagtccaataggatgtagacccagttctgaaatcctgagtaaatataagatgttgactggagaatgcaaaggaagtataacctgccctttcaggaaaaaaaaaaaaaaaaaa

SEQ ID NO: 926 - DNA, 1259 bp, Zea mays
ccccaacgccgtcgtcgtcgtgtctccgctccagagtgatcgagcacactgacctggcctgcccacccaagcctcagctcgtgagccagcgcgcctcgccatggccatggtgcaggcggcggacgcggccgtcaaggccaacgagatcctggcgcggtttcggcccatcgcgcccaatcccacactggcggccgagggcgtggtggccgcgaaccgcgtgctgtgccatctgcagagcaagccgtgccgcgcgcggaaacgcggccgccccggccccgccgtcgtggctccgtcgcccgagtcgggcttacagccgcccgccaagcggaagagagccacgacgccgtacccgcctctccggtgcagggggccgcgtgcgtccgcggccgtcccgggcagtgcaggcctccctctggcgtcggcgtcgctcccgccggcgggtgcgggtactgccgaggacctcgcgaaggtggcggcggaggggagggacgtccccgtggagcgcgacctgctgcggaagctgctggagcccaaggtcatctcgccgcgggcggtgcgccccgtgtgctccgccatccacgtcgggtgcatccaccgcgccgacgcgacctgcaccgccgccgtctcgaagacagcggttcgtgtggaggcggagctggaggtcgacgcgctcccggcggttgtctccgacgccagcaaccgcgtccggctcgtgaacgacgcgtacaaggagatggtggggcagcccgagtgcccgtggctcgacgccgtggctgccacgtcgaggaggatcagcggggaggtcgcgctggtggtagccaaccagtcctccctgccagagtcgtacggggtgttcacatgcacggcaaagatcgagtgggaggacgacgggaaggtcgcctccatcgatgtaccctgcgacgtcagccggctgcagtgcgagtccagagagtacctcttcgtctggaggttccgtaccgccgacgccgacgccgacgcatccgttggctgcagctccgaggagattagtgagagttaggggaagcttgcttgagctgcatcctgtgcgcgctgcagtgaaaccaggtgcataggctaagcaagctgcatctcaaaaactggccagcttcctctttcgcctagtccatagagtgtagacccagttctgaaatctggagtaaatataagatctcgactggagaatgcaaatggaaaattggaaatataacatgtactttttcacgaaaaaaaaaaaaaaa

SEQ ID NO: 927 - protein, 488 aa, Sorghum bicolor
MATQAAFLAGLSQLAAQPGRDRAVAPARVAVAAVGVGSAKVGVRVGVKAGTAEAKAVAQRRGVRCRASLIEPDGGRLVDLVAPEEGGRRAALRREAAELPHRLRLSRVDKEWVHVLSEGWASPLQGFMREHEFLQALHFNAIRGADGRMVNMSVPIVLSLGDAQRRAIQADGATRVALVDQRDRPIAVLSDIEIYKHNKEERIARTWGTTAPGLPYVEEAITNAGDWLIGGDLEVIEPIKYNDGLDQYRLSPAQLREEFARRNADAVFAFQLRNPVHNGHALLMTDTRKRLLEMGYKNPVLLLHPLGGFTKADDVPLSWRMKQHEKVLEEGVLNPESTVVAIFPSPMHYAGPTEVQWHAKARINAGANFYIVGRDPAGMSHPTEKRDLYDADHGKKVLSMAPGLERLNILPFKVAAYDTKQKKMDFFDPSRKDDFLFISGTKMRTLAKNRENPPDGFMCPGGWKVLVEYYDSLVPSEGSSKLREPVAA

SEQ ID NO: 928 - protein, 487 aa, Zea mays
MAMQAAFLAGFSQLAAQPSRDCAVAVAPTRVAVAAVGSAKVGARVGLKAGIAAPAPAAGRGVRCRASLIEPDGGQLVDLVAPEEGGRRAALRREAAELPHRLRLGRVDKEWVHVLSEGWASPLQGFMREHEFLQTLHFNAIRGQDGRMVNMSVPIVLSVGDAQRRAIQADGATRVALVDERDRPIAVLSDIEIYKHNKEERIARTWGTTAPGLPYVEEAITNAGDWLIGGDLEIIEPIKYNDGLDQYRLSPAQLREEFARRNADAVFAFQLRNPVHNGHALLMTDTRKRLLEMGYKNPVLLLHPLGGFTKADDVPLSWRMKQHEKVLEEGVLNPESTVVAIFPSPMHYAGPTEVQWHAKARINAGANFYIVGRDPAGMSHPTEKRDLYDADHGKKVLSMAPGLERLNILPFKVAAYDTKQKKMDFFDPSRKDDFLFISGTKMRTLAKNRESPPDGFMCPGGWKVLVEYYDSLVPSEGSSKLREPIAA

SEQ ID NO: 929 - protein, 489 aa, Zea mays
MATQAAFLAGFSQLAAQPGRDRAVAVAVAPAPGPARVAVAAVGSAKLGVKAGTSRTAAVARLGVRCRASLIEPDGGRLVDLVAPEEGGRRAALRREAAELPHRLRLGRVDKEWVHVLSEGWASPLQGFMREHEFLQALHFNAIRGQDGRMVNMSVPIVLSVGDAQRRAIQADGATRVALVDERDRPIAVLSDIEIYKHNKEERVARTWGTTAPGLPYVEEAITNAGDWLVGGDLEVIEPIKYNDGLDQYRLSPAQLREEFARRNADAVFAFQLRNPVHNGHALLMTDTRKRLLEMGYKNPVLLLHPLGGFTKADDVPLSWRMKQHEKVLEEGVLNPESTVVAIFPSPMHYAGPTEVQWHAKARINAGANFYIVGRDPAGMSHPTEKRDLYDADHGKKVLSMAPGLERLNILPFKVAAYDTKQKKMDFFDPSRKDDFLFISGTKMRTLAKNRESPPDGFMCPGGWKVLVEYYDSLVPSEGSSKLREPVAA

SEQ ID NO: 930 - protein, 487 aa, Zea mays
MAMQAAFLAGFSQLAAQPSRDCAVAVAPTRVAVAAVGSAKVGARVGLKAGIAAPAPAAGRGVRFRASLIEPDGGQLVDLVAPEEGGRRAALRREAAELPHRLRLGRVDKEWVHVLSEGWASPLQGFMREHEFLQTLHFNAIRGQDGRMVNMSVPIVLSVGDAQRRAILADGATRVALVDERDRPIAVLSDIEIYKHNKEERIARTWGTTAPGLPYVEEAITNAGDWLIGGDLEIIEPIKYNDGLDQYRLSPAQLREEFARRNADAVFAFQLRNPVHNGHALLMTDTRKRLLEMGYKNPVLLLHPLGGFTKADDVPLSWRMKQHEKVLEEGVLNPESTVVAIFPSPMHYAGPTEVQWHAKARINAGANFYIVGRDPAGMSHPTEKRDLYDADHGKKVLSMAPGLERLNILPFKVAAYDTKQKKMDFFDPSRKDDFLFISGTKMRTLAKNRESPPDGFMCPGGWKVLVEYYDSLVPSEGSSKLREPIAA

SEQ ID NO: 931 - protein, 489 aa, Zea mays
MATQAAFLAGFSQLAAQPGRDRAVAVAVAPAPGPARVAVAAVGSAKLGVKAGTSRTAAVARLGVRCRASLIEPDGGRLVDLVAPEEGGRRAALRREAAELPHRLRLGRVDKEWVHVLSEGWASPLQGFMRDDEFLQTLHFNAIRGQDGRMVNMSVPIVLSVGDAQRRAIQADGATRVAVVDERDRPIAVLSDIEIYKHNKEERIARTWGTTAPGLPYVEEAITNAGDWLIGGDLEVIEPIKYNDGLDQYRLSPAQLREEFARRNADAVFAFQLRNPVHNGHALLMTDTRKRLLEMGYKNPVLLPHPLGGFTKADDVPLSWRMKQHEKVLEEGVLNPESTVVAIFPSPMHYAGPTEVQWHAKARINAGANFYIVGRDPAGMSHPTEKRDLYDADHGKKVLSMAPGLERLNILPFKVAAYDTKQKKMDFFDPSRKDDFLFISGTKMRTLAKNRESPPDGFMCPGGWKVLVEYYDSLVPSEGSSKLREPIAA

SEQ ID NO: 932 - protein, 477 aa, Oryza sativa Indica Group
MAMQAAFAASMFPQLAQRRGSDRAVVVAPPAPAPVRVAMRSGGAAAAAARGVRCRASLIEPDGGRLVELVVPEEGGRREAARREAAALAHRVRLGRVETEWLHVLSEGWASPLRGFMREAEFLQALHFNAIRGGDGAMVNMSVPIVLPLGDAQRRAIEASGARRVALVDAADRPLAVLSDIEIYKHNKEERIARTWGTTAPGLPYVDEAITNAGDWLIGGDLEVIEPIKYNDGLDQYRLSPAQLREEFARRNADAVFAFQLRNPVHNGHALLMTDTRKRLLEMGYKNPVLLLHPLGGFTKADDVPLSWRMKQHEKVLEEGVLNPESTVVAIFPSPMHYAGPTEVQWHAKARINAGANFYIVGRDPAGMGHPTEKRDLYDADHGKKVLSMAPGLEKLNILPFKVAAYDTKQKKMDFFDPSRKDDFLFISGTKMRTLAKNRQSPPDGFMCPGGWKVLVEYYDSLTPSADSSKLREAVAA

SEQ ID NO: 933 - protein, 477 aa, Oryza sativa Japonica Group
MAMQAAFAASMFPQLAQRRGSDRAVVVAPPAPAPVRVAMRSGGAAAAAARGVRCRASLIEPDGGRLVELVVPEEGGRREAARREAAALAHRVRLGRVETEWLHVLSEGWASPLRGFMREAEFLQALHFNAIRGGDGAMVNMSVPIVLPLGDAQRRAIEASGARRVALVDAADRPLAVLSDIEIYKHNKEERIARTWGTTAPGLPYVDEAITNAGDWLIGGDLEVIEPIKYNDGLDQYRLSPAQLREEFARRNADAVFAFQLRNPVHNGHALLMTDTRKRLLEMGYKNPVLLLHPLGGFTKADDVPLSWRMKQHEKVLEEGVLNPESTVVAIFPSPMHYAGPTEVQWHAKARINAGANFYIVGRDPAGMGHPTEKRDLYDADHGKKVLSMAPGLEKLNILPFKVAAYDTKQKKMDFFDPSRKDDFLFISGTKMRTLAKNCQSPPDGFMCPGGWKVLVEYYDSLTPSADSSKLREAVAA

SEQ ID NO: 934 - protein, 473 aa, Hordeum vulgare subsp. vulgare
MATQAAFAVRFPQLARPSRGQGQPAPAPARVAVRGVGRAAAAAARGVRCRAGGLIEPDGGRLVELVAPEEGGRRAALRREAAALPHRVRLGRVDTEWLHVLSEGWASPLRGFMRETEFLQALHFNAVRGADGSLVNMSVPIVLALDDAQRRAIQASAATSVALVDAHDRPVAVLRDIEIYKHNKEERIARTWGTTARGLPYVEEAITNAGDWLIGGDLEVIEPIKYNDGLDQYRLSPAQLREEFARRNADAVFAFQLRNPVHNGHALLMTDTRRRLLEMGYKNPVLLLHPLGGFTKADDVPLSVRMKQHEKVLEEGVLNPESTVVAIFPSPMHYAGPTEVQWHAKARINAGANFYIVGRDPAGMGHPTEKRDLYDADHGKKVLSMAPGLERLNILPFKVAAYDTKHNKMNFFDPSRKEDFLFISGTKMRSLAKNRESPPDGFMCPGGWKVLVEYYDSLAPPEGSSKLREAVAA

SEQ ID NO: 935 - protein, 476 aa, Oryza sativa Indica Group
MAMQAAFAASMFPQLAQRRGSDRAVVVAPPAPAPVRVAMRSGGAAAAAARGVRCRASLIEPDGGRLVELVVPEEGGRREAARREAAALAHRVRLGRVETEWLHVLSEGWASPLRGFMREAEFLQALHFNAIRGGDGAMVNMSVPIVLPLGDAQRRAIEASGARRVALVDAADRPLAVLSDIEIYKHNKEERIARTWGTTAPGLPYVDEAITNAGDWLIGGDLEVIEPIKYNDGLDQYRLSPAQLREEFARRNADAVFAFQLRNPVHNGHALLMTDTRKRLLEMGYKNPVLLLHPLGGFTKADDVPLSWRMKQHEKVLEEGVLNPESTVVAIFPSPMHYAGPTEVQWHAKARINAGANFYIVGRDPAGMGHPTEKRDLYDADHGKKVLSMAPGLEKLNILPFKAAYDTKQKKMDFFDPSRKDDFLFISGTKMRTLAKNRQSPPDGFMCPGGWKVLVEYYDSLTPSADSSKLREAVAA

SEQ ID NO: 936 - protein, 461 aa, Oryza sativa Japonica Group
MAMQAAFAASMFPQLAQRRGSDRAVVVAPPAPAPVRVAMRSGGAAAAAARGVRCRASLIEPDGGRLVELVVPEEGGRREAARREAAALAHRGGASPLRGFMREAEFLQALHFNAIRGGDGAMVNMSVPIVLPLGDAQRRAIEASGVRRVALVDAADRPLAVLSDIEIYKHNKEERIARTWGTTAPGLPYVDEAITNAGDWLIGGDLEVIEPIKYNDGLDQYRLSPAQLREEFARRNADAVFAFQLRNPVHNGHALLMTDTRKRLLEMGYKNPVLLLHPLGGFTKADDVPLSWRMKQHEKVLEEGVLNPESTVVAIFPSPMHYAGPTEVQWHAKARINAGANFYIVGRDPAGMGHPTEKRDLYDADHGKKVLSMAPGLEKLNILPFKVAAYDTKQKKMDFFDPSRKDDFLFISGTKMRTLAKNCQSPPDGFMCPGGWKVLVEYYDSLTPSADSSKLREAVAA

SEQ ID NO: 937 - protein, 533 aa, Sorghum bicolor
MSLASAGAAAARKPAAAWRRPGGVGGGRGVGVARRRAVAAAAALLLALVYAAGLLVFLLGGRLSGGGATAGGPGPAAVTVASSLRRRTRPVDGEPPHAQLRLMTSHYQNSGDPWMPCVNSRLTRSELPPSNGYLMIEANGGLNQQRLSICDAVAVASLLNATLVIPTFHLNSVWRDPSKFGDIFDEDHFIETLKEHVRVVKKLPEDVLLRFNHNISSIPNMRTKAYSSPNHYVQNVLPKLLELGVVRIAPFSNRLALSVPLNIQALRCLVNYHALRFAEPIRILSDDLVGRMTKKSLLTGGKYVSVHLRFEEDMVAFSCCTYDGGWREKTEMDNARERSWRGKFRRHGRVINPEANRRDGKCPLTPLEVGMMLRGMGFDNTTSLYVASGKIYNSEKYMAPLRQMFPLLTTKDSLALPEELAQFKGHSSQLAALDYTVCVQSEVFVTTQGGNFPHFLMGHRRYLFGGNAKTIKPDKRKLVLSFDDPNIRWDQFKQNMQEILHHSDMKSIAFRKPNDSVYTFPMPECMCQQDGMI

SEQ ID NO: 938 - protein, 491 aa, Oryza sativa Japonica Group
MTVASLRRRRAAAAAAPQPGSVYRSHLVFERLWPDIRDDASSASAAASSLSSTSWRRSMLMTSHYQNPGELWMPCVNRKLIRPELPPSNGYLMIEANGGLNQQRLSICDAVAVASLLNATLVIPAFHFNSVWRDHSKFGDIFDEDHFIETLKEHVRVVKELPVDVLTRFDHNISSIPNMRTKAYSSPNHYMQKVLPKLLELGAVRIAPFSNRLAQSVPSNLQALRCFVNYQALRFAEPIRVLAEDMVERMVKRSTLTGGKFVSVHLRFEEDMVAFSCCTYDGGLKEKTEMENARERSWRGKFHRHGRVINPEANRRDGKCPLTPLEVGMMLRGMGFDNTTSLYVASGKIYNAEKYMAPLRQMFPLLATKDTLALPEELAEFEGHSSRLAALDYSVCLPSEVFVTTQGGNFPHFLMGHRRYLFGGNARTIKPDKRKLVLSFDDPNIRWNRFKRHMQDILHHSDMRGTALRKPNDSIYTFPMPECMCQQDGMM

SEQ ID NO: 939 - protein, 562 aa, Oryza sativa Japonica Group
MSVALYARGGGCGAKAAAARRSGRGGGGRRRAAVVLLLALAYVAGLLVFVLAGGGGVGVGGRVEVGREVGVMTVASLRRRRAAAAAAPQPGSVYRSHLVFERLWPDIRDDASSASAAASSLSSTSWRRSMLMTSHYQNPGELWMPCVNRKLIRPELPPSNGYLMIEANGGLNQQRLSICDAVAVASLLNATLVIPAFHFNSVWRDHSKFGDIFDEDHFIETLKEHVRVVKELPVDVLTRFDHNISSIPNMRTKAYSSPNHYMQKVLPKLLELGAVRIAPFSNRLAQSVPSNLQALRCFVNYQALRFAEPIRVLAEDMVERMVKRSTLTGGKFVSVHLRFEEDMVAFSCCTYDGGLKEKTEMENARERSWRGKFHRHGRVINPEANRRDGKCPLTPLEVGMMLRGMGFDNTTSLYVASGKIYNAEKYMAPLRQMFPLLATKDTLALPEELAEFEGHSSRLAALDYSVCLPSEVFVTTQGGNFPHFLMGHRRYLFGGNARTIKPDKRKLVLSFDDPNIRWNRFKRHMQDILHHSDMRGTALRKPNDSIYTFPMPECMCQQDGMM

SEQ ID NO: 940 - protein, 566 aa, Oryza sativa Indica Group
MSVALYARGGGVGCGAKAAAAARRPGRGGGGGRRRAAAVLLLLLALAYVAGLLVFVLAGVAGVGGRLELGREVGVMTVASLRRRRAAAAAAAQPGSVYRSHLVFERLWPDIRDDASSASAAASSLSSTSWRRSMLMTSHYQNPGELWMPCVNRKLIRPELPPSNGYLMIEANGGLNQQRLSICDAVAVASLLNATLVIPAFHFNSVWRDHSKFGDIFDEDHFIETLKQHVRVVKELPVDVLTRFDHNISSIPNMRTKAYSSPNHYMQKVLPELLELGAVRIAPFSNRLAQSVPSNLQALRCFVNYQALRFAGPIRVLAEDMVERMVKRSTLTGGKFVSVHLRFEEDMVAFSCCTYDGGLKEKTEMENARERSWRGKFHRHGRVINPEANRRDGKCPLTPLEVGMMLRGMGFDNTTSLYVASGKIYNAEKYMAPLRQMFPLLATKDTLALPEELAEFEGHSSRLAALDYSVCLPSEVFVTTQGGNFPHFLMGHRRYLFGGNAKTIKPDKRKLVLSFDDPNIRWNRFKRHMQDILHHSDMRGTALRKPNDSIYTFPMPECMCQQDGMM

SEQ ID NO: 941 - protein, 489 aa, Zea mays; identical to SEQ ID NO: 929

SEQ ID NO: 942 - protein, 489 aa, Zea mays; identical to SEQ ID NO: 931

SEQ ID NO: 943 - protein, 487 aa, Zea mays; identical to SEQ ID NO: 928

SEQ ID NO: 944 - protein, 487 aa, Zea mays; identical to SEQ ID NO: 930

SEQ ID NO: 945 - protein, 488 aa, Sorghum bicolor; identical to SEQ ID NO: 927

SEQ ID NO: 946 - protein, 473 aa, Hordeum vulgare subsp. vulgare; identical to SEQ ID NO: 934

SEQ ID NO: 947 - protein, 477 aa, Oryza sativa Indica Group; identical to SEQ ID NO: 932

SEQ ID NO: 948 - protein, 477 aa, Oryza sativa Japonica Group; identical to SEQ ID NO: 933

SEQ ID NO: 949 - protein, 476 aa, Oryza sativa Indica Group; identical to SEQ ID NO: 935

SEQ ID NO: 950 - protein, 461 aa, Oryza sativa Japonica Group; identical to SEQ ID NO: 936

SEQ ID NO: 951 - protein, 384 aa, Sorghum bicolor
MASSPAEAEAEAGAPEAAEKGKRGGGVLGRLWRALFGGREDFEKRLQYLSKEEAAVHARMRRRTQFSRRAVRNLIVLSVLAEVLAVVYAIMMTRDEDLTWQMRAIRVLPMFILPAVSSAIYSMIVNFTRMLERKDQKTLEKLRAERKAKIDELKERTNYYLTQQLIQKYDLDPAAKAAAASVLASKLGEETGLKVHVGEEPKLDAAVARSNDVEIVPSDGLRNRKHPNARGSRTGSPTAHTEPSLPANAGLETARAPMVVEHHQGSGASDGGGWIGKIAALLVGEDPSQSYALICGNCHMHNGLARKEDYPHVTYYCPHCHALNTSKQSMGQYSGSDSGQSTPVVLADGLSTSSSVQETELSNLTTLQELPEEGNAEKREVEAS

SEQ ID NO: 952 - protein, 395 aa, Zea mays
MASTQAEAEAGAPAPPEAAEAKEKGKQGGVLGRVWRALFGGREDFEKRLQYLSKEEAAVHARMRRRTQFSRRAVRNLIVLSVLAEVLAVVYAIMTTRNEDLTWQMRAIRVLPMFILPAVSSVIYSTVVNFTRMFEQKDQKTLEKLRAERKAKIDELKERTNYYLTQQLIQKYDLDPAAKAAAASVLASKLGEETGLKVHVGEEPKLDAAVARSNDVEIVPSDGLRNRKQPSARGSRTGSPTSHTPAQGTETNLPPAPASAGLETAPAPVVVEHHQGSGASDGGGWIAKIAALLVGEDPSQSYALICGSCHMHNGLARKEDYPHVTYYCPHCHALNTSKQSMGQYSGSNSGRSTPVVLADGLSTSSSVQETELSNLTTLQELPEEGKTDKQQVEAS

SEQ ID NO: 953 - protein, 393 aa, Zea mays
MASTQAEAEAGAPAPPEAAEAKEKGKQGGVLGRVWRALFGGREDFEKRLQYLSKEEAAVHARMRRRTQFSRRAVRNLIVLSVLAEVLAVVYAIMTTRNEDLTWQMRAIRVLPMFILPAVSSVIYSTVVNFTRMFEQKDQKTLEKLRAERKAKIDELKERTNYYLTQQLIQKYDLDPAAKAAAASVLASKLGEETGLKVHVGEEPKLDAAVARSNDVEIVPSDGLRNRKQPNARGSRTGSPTSHTPAQGTETNLPPASAVLETAPAPVVVEHHQGSGASDGGGWIAKIAALLVGEDPSQSYALICGSCHMHNGLSRKEDYPHVTYYCPHCHALNTSKQSMGQYSGSNSGRSTPVVLADGLSTSSSVQETELSNLTTLQELPEEGKTDKQQVEAS

SEQ ID NO: 954 - protein, 377 aa, Zea mays
MAASPAEAGAQALPEATEAKEKGKRGGVLRRVWRALFGGREDFEKRLQYLSKEEAAVHARMRRRTQFSRRTVRNLIVLSVLAEVLAVVYAIMMTRNEDLTWQMRAIRVLPMFVLPVVSSVIYSTVVNFTRMLERKDQKTLEKLRAERKAKIDELKERTNYYLTQQLIQKYDLDPAAKAAAASVLASKLGEDTGLKVHVGEEPKLDAAVARSNDVEIVPSDGLRNRKQPNARGSRTGSPTADTPARGTESSLTAGADLETAPAPLVVEHHQGLGASDGGGWIAKIAALLVAEDPSQSYALICGNCHMHNGLARKEDYPHVTYYCPHCHALNTSKQSMWQYSGSNSGRSSPVVLDDGLSTSSSVQETELSNLTHTAGAT

SEQ ID NO: 955 - protein, 389 aa, Oryza sativa Japonica Group
MASSPEAAAVGEEEKGKGKKEEGRRGGGVLGRMWRALFGGREDYEKRLQYLSKEEAAVHARMRRRTQFSRTAVRNLIVLSVLAEVVAIVYAIMTTRNEHITWEMRAIRVLPMFVLPAVSSVIYSTVVKFTRMLERKDQKTLEKLRAERKAKIDELKERTNYYLTQQLIQKYDLDPAAKAAAASVLASKLGEETGLKVHVGEEPKLDSAVARSNDVEISPSEGLRNRKQSNARGSRTGGTTAAQNPAQGAESSLTSSSGLEQPPMVVEHFQGSGASDGGWIAKIAALLVGEDPSQSYALICGNCHMHNGLARKEDYPHITYYCPHCHALNTSKQSLGQHSGSNSGRSTPVAPADGISASSSVVESEVSNMTTIQELKNEENTEKQEVQAS

SEQ ID NO: 956 - protein, 393 aa, Hordeum vulgare subsp. vulgare
MASTPADGAGEPVEAKGKGKEEGEKKKAGGGVLGRMWRGIFGGREDYEKRLQYLSKEEAAVHARMRRRTQFSRRTVRNIIVLSVLAEAVAVGYAIMMTRDEDLTWQMRAIRVLPIFVLPAISSVVYSAVVNFTRMRERKDEKTLEKLRAERKAKIDELKERTNYYLTQQLIQKYDLDPAAKAAAASVLASKLGADSGLKVHLGEEPNFDAAVVMSNNAEILPSDGVRNRKQPNARGSRTGSTTAAHTSVQGAESSSTLNAGLENVQPTRVVEHCQGSGASDGGWIAKIAALLVGEDPSQSYALICGNCHMHNGLARKEDYPHITYYCPHCHALNTSKNSMGQYSGSSSGPSTPVAPADGLSATSSVVESELINMATVEELPNEEHTEKKVEAS

SEQ ID NO: 957 - protein, 455 aa, Zea mays
MQLDLNVAEAPPPVEMEASDSGSSVLNASEAASAGGAPAPAEEGSSSTPAVLEFSILIRSDSDAAGADEDEDATPSPPPRHRHQHQQQLVTRELFPAGAGPPAPTPRHWAELGFFRADLQQQQAPGPRIVPHPHAAPPPAKKSRRGPRSRSSQYRGVTFYRRTGRWESHIWDCGKQVYLGGFDTAHAAARAYDRAAIKFRGVDADINFNLSDYEDDMKQMGSLSKEEFVHVLRRQSTGFSRGSSRYRGVTLHKCGRWEARMGQFLGKKAYDKAAIKCNGREAVTNFEPSTYHGELPTEVADVDLNLSISQPSPQRDKNSCLGLQLHHGPFEGSELKKTKIDDAPSELPGRPRQLSPLVAEHPPAWPAQPPHPFFVFTNHEMSASGDLHRRPAGAVPSWAWQVAAAAPPPAALPSSAAASSGFSNTATTAATTAPSASSLRYCPPPPPPSSHHHPR

SEQ ID NO: 958 - protein, 456 aa, Zea mays
MQLDLNVAEAPPPVEMEASDSGSSVLNASEAASAGGAPAPAEEGSSSTPAALEFSILIRSDSDAAGADEDEDATPSPPPRHRHQHQQQLVTRELFPAGAGPPAPAPRHWAELGFFRADLQQQQAPGPRIVPHPHAAPPPAKKSRRGPRSRSSQYRGVTFYRRTGRWESHIWDCGKQVYLGGFDTAHAAARAYDRAAIKFRGVDADINFNLSDYEDDMKQMGSLSKEEFVHVLRRQSTGFSRGSSRYRGVTLHKCGRWEARMGQFLGKKAYDKAAIKCNGREAVTNFEPSTYHGELPTEVADVDLNLSISQPSPQRDKNSCLGLQLHHGPFEGSELKKTKIDDAPSDLPGRPRRLSPLVAEHPPAWPAQPPHPFFVFTNHEMSASGDLHRRPAGAVPSWAWQVAAAAPPPAALPSSAAASSGFSNTATTAATAAPSASSLRYCPPPPPPPSSHHHRR

SEQ ID NO: 959 - protein, 539 aa, Sorghum bicolor
MASPAIPFAPLTSHRAVPFVLGCPPPWPPRPPPAAPGRPPRPDAAAAARLLEEEARAGSSRARSPAGRPELESMVLDLNAESPTAGSASATSSSSGVFRFDLLGGTPDEEGCSPSPPVVTRQLFPLPSYPDAAAAPTAASNGSPPPPQAAGPWARRAADLVAPALGQGQGQGAVVMPAPSSPPAAVSPAAGKKSRRGPRSRSSQYRGVTFYRRTGRWESHIWDCGKQVYLGGFDTAHAAARAYDRAAIKFRGLDADINFQLKDYEDDLKQMKNWTKEEFVHILRRQSTGFARGSSKYRGVTLHKCGRWEARMGQLLGKKYIYLGLFDSEIEAARAYDRAAIRFNGPDAVTNFDSSSYDGDVPLPTAIEKDVVDGDILDLNLRISQPNVHDLKSDGTLTGFGLGCNSPEASSSIVSQPISPQWPVHPHSTPMQLQHPHLYASPCPGFFVNLREAPMEEEKRAERAGPEPAFPSWAWQTQGSPAPFLPATATAASSGFSTAATTTGVDAATAARSVPPSLSGGPRQLFSGYQLQLRFPPTA

SEQ ID NO: 960 - protein, 535 aa, Zea mays
MASPAIPFAPLTSHRAAPFVLGCPPPWPPPPPPAARPRPPPPRPDAAAAARLLEEEAGAGSSRARSPGGPELESMVLDLNAESPTPGSASAASSSSVVVGGGFFRFDLLGGTPDEEGCSPSPPIVTRQLFPLPYPDAAGSTAASTASNGSPPPEVAGAWARRPADLGAPALAQGKVMSAPSSPAVLSPAAGKKSRRGPRSRSSQYRGVTFYRRTGRWESHIWDCGKQVYLGGFDTAHAAARAYDRAAIKFRGLDADINFQLKDYEDDLKQMRNWTKEEFVHILRRQSTGFARGSSKYRGVTLHKCGRWEARMGQLLGKKYIYLGLFDSEIEAARAYDRAAIRFNGPDAVRNFDSVSYDGDVPLPPAIEKDAVVDGDILDLNLRISQPNVHDLRSDGTLTGFGLSCNSPEASSSIVSQPMGPQWPVHPHSRSMRPQHPHLYASPCPGFFVNLREAPMQEEENRSEPACPQPFPSWAWQTQGSRAPVLPATTAASSGFSTAAATGVDAATAGHSVPPPSGSLRQFSGYHQLRFPPTA

SEQ ID NO: 961 - protein, 528 aa, Zea mays
PFAPLTSHRAAPFVLGCPPPWPPPPPPAARPRPPPPRPDAAAAARLLEEEAGAGSSRARSPGGPELESMVLDLNAESPTPGSASAASSSSVVVGGGFFRFDLLGGTPDEEGCSPSPPIVTRQLFPLPYPDAAGSTAASTASNGSPPPEVAGAWARRPADLGAPALAQGKVMSAPSSPAVLSPAAGKKSRRGPRSRSSQYRGVTFYRRTGRWESHIWDCGKQVYLGGFDTAHAAARAYDRAAIKFRGLDADINFQLKDYEDDLKQMRNWTKEEFVHILRRQSTGFARGSSKYRGVTLHKCGRWEARMGQLLGKKYIYLGLFDSEIEAARAYDRAAIRFNGPDAVRNFDSVSYDGDVPLPPAIEKDVVDGDILDLNLRISQPNVHDLRSDGTLTGFGLSCNSPEASSSIVSQPMGPQWPVHPHSRSMRPQHPHLYASPCPGFFVNLREAPMQEEENRSEPACPQPFPSWAWQTQGSRAPVLPATTAASSGFSTAAATGVDAATAGHSVPPPSGSLRQFSGYHQLRFPPTA

SEQ ID NO: 962 - protein, 460 aa, Zea mays
MVLDLNAESPTPGSASAASSSSVVVGGGFFRFDLLGGTPDEEGCSPSPPIVTRQLFPLPYPDAAGSTAASTASNGSPPPEVAGAWARRPADLGAPALAQGKVMSAPSSPAVLSPAAGKKSRRGPRSRSSQYRGVTFYRRTGRWESHIWDCGKQVYLGGFDTAHAAARAYDRAAIKFRGLDADINFQLKDYEDDLKQMRNWTKEEFVHILRRQSTGFARGSSKYRGVTLHKCGRWEARMGQLLGKKYIYLGLFDSEIEAARAYDRAAIRFNGPDAVRNFDSVSYDGDVPLPPAIEKDVVDGDILDLNLRISQPNVHDLRSDGTLTGFGLSCNSPEASSSIVSQPMGPQWPVHPHSRSMRPQHPHLYASPCPGFFVNLREAPMQEEENRSEPACPQPFPSWAWQTQGSRAPVLPATTAASSGFSTAAATGVDAATAGHSVPPPSGSLRQFSGYHQLRFPPTA

SEQ ID NO: 963 - protein, 142 aa, Oryza sativa Japonica Group
MGKTRGMGAGRKLKTHRRNQRWADKAYKKSHLGNEWKKPFAGSSHAKGIVLEKIGIEAKQPNSAIRKCARVQLVKNGKKIAAFVPNDGCLNFIEENDEVLIAGFGRKGHAVGDIPGVRFKVVKVSGVSLLALFKEKKEKPRS

SEQ ID NO: 964 - protein, 142 aa, Zea mays
MGKTRGMGAGRKLKTHRRNQRWADKAYKKSHLGNEWKKPFAGSSHAKGIVLEKIGIEAKQPNSAIRKCARVQLVKNGKKIAAFVPNDGCLNYIEENDEVLIAGFGRKGHAVGDIPGVRFKVVKVSGVSLLALFKEKKEKPRS

SEQ ID NO: 965 - protein, 142 aa, Zea mays
MGKTRGMGAGRKLKTHRRNQRWADKAYKKSHLGNEWKKPFAVSSHAKGIVLEKIGIEAKQPNSAIRKCARVQLVKNGKKIAAFVPNDGCLNYIEENDEVLIAGFGRKGHAVGDIPGVRFKVVKVSGVSLLALFKEKKEKPRS

SEQ ID NO: 966 - protein, 142 aa, Elaeis guineensis
MGKTRGMGAARKLKTHRRRQRWADKAYKKSHLGNEWKKPFAGSSHAKGIVLEKIGIEAKQPNSAIRKCARVQLIKNGKKIAAFVPNDGCLNFIEENDEVLIAGFGRKGHAVGDIPGVRFKVVKVSGVSLLALFKEKKEKPRS

SEQ ID NO: 967 - protein, 142 aa, Elaeis guineensis
MGKTRGMGAARKLKTHRRRQRWADKAYKKSHLGNEWKKPFAGSSHAKGIVLEKIGIEAKQPNSAIRKCARVQLIKNGKKIAAFVPNDGCLNYIEENDEVLIAGFGRKGHAVGDIPGVRFKVVKVSGVSLLALFKEKKEKPRS

SEQ ID NO: 968 - protein, 142 aa, Solanum tuberosum
MGKTRGMGAGRKLKSHRRRQRWADKSYKKSHLGNEWKKPFAGSSHAKGIVLEKIGIEAKQPNSAIRKCARVQLIKNGKKIAAFVPNDGCLNYIEENDEVLIAGFGRKGHAVGDIPGVRFKVVKVSGVSLLALFKEKKEKPRS

SEQ ID NO: 969 - protein, 142 aa, Ricinus communis
MGKTRGMGAARKLKSHRRRQRWADKAYKKSHLGNEWKKPFAGSSHAKGIVLEKIGIEAKQPNSAIRKCARVQLIKNGKKIAAFVPNDGCLNYIEENDEVLIAGFGRKGHAVGDIPGVRFKVVKVSGVSLLALFKEKKEKPRS

SEQ ID NO: 970 - protein, 142 aa, Vitis vinifera
MGKTRGMGAGRKLKSHRRRQRWADKAYKKSNLGNEWKKPFAGSSHAKGIVLEKIGIEAKQPNSAIRKCARVQLIKNGKKIAAFVPNDGCLNYIEENDEVLIAGFGRKGHAVGDIPGVRFKVVKVSGVSLLALFKEKKEKPRS

SEQ ID NO: 971 - protein, 325 aa, Zea mays
MDWAAASGSPSWGAAATDPGPTMLSFAGPSSSAADAEVRLQDFAAGLAQSSRPTGAAPGAGRRSRAAVGGAGAEACSVDGCRSDLSRCREYHRRHKVCEAHSKAPVVVVGGQERRFCQQCSRFHMLSEFDEEKRSCRKRLDGHNRRRRKPQHDLTNLGGFFPYHQVNQFEFYPQTIPTVGQNSDAVHLVGRQQPFSISFSRTPDEFPFPQGGGSSVLHHLHAARPGHHAEGSSHTGSSTRDNALSGTLGPECALSLLSSSLRRPSTAGVPAVGQPQVTASSTTAVSQAATAAVATAAFAASAGHHVFVPDAMFEDPSQALPFSWQ

SEQ ID NO: 972 - protein, 331 aa, Zea mays
MDWAAASGSPSWGAAATDPGPTMLSFAGPSSAAADAEVRLQDFAAGLAQSSRPTGAAPGAGRRSRAAGGGAGAEACSVDVCRSDLSRCREYHRRHKVCEAHSKAPVVVVGGQERRFCQQCSRFHMLSEFDEEKRSCRKRLDGHNRRRRKPQHDLTNLGGFFPYHQVNQFEFYPQTIPTVGQNSDAVHLVGRQQPFSISFSRTPPDEFPFPQGQGGGSSVLHHLHAARPGHHAEGSSSHTGSSTRDNALSVSGTLGPECALSLLSSSLRRPSTAGVPAVGQPQVTASSTTAVSQAATAAVATAAFAASAGHRVFVPDAMFEDPSQALPFSWQ

SEQ ID NO: 973 - protein, 325 aa, Sorghum bicolor
MDWAAASGAPSWGAAATDPGPTMLSFAGPSSSTTPAADAEARLQDFAAGLAQSARPAGAAGAGRRSRAAGGGAGVEACSVDGCRSDLSRCREYHRRHKVCEAHSKTPVVVVAGQEQRFCQQCSRFHMLSEFDEGKRSCRKRLDGHNRRRRKPQHDLTNLGGFFPYHQVNQFEVYPRTIPTVGQNSDAMHLVGRQQPFSISFSRTPNQFPFPQGGGSTLHAARPGHLLAEGSSHTGSSTCSNPLSGTLGPECALSLLSSSLHHPSAAGIPTAGQPQVASSLSRIAAVSQAATTAMATAFAAGVGHHVFVPDAMFEDPSQALPFSWQ

SEQ ID NO: 974 - protein, 264 aa, Sorghum bicolor
MGGGECALGDAAIGEETLNYDGDDVEMADADSDTEEALAAEVSAGTGGAAGGGGHAEKDGPEGKKKKKKKRNKGKKNKGRQDAAPTTIAGINRFVLETCKRLKEKKSYLVWNAVGCLGVTAVTDLVREVEAIQKCGGQTIADGSRFRTGGGILWNILKSREPKAYKEIMAKGKELEKQFRYTKRPQISRNEDASSQGSALIDDEIEAQEQKEMLDDPEQLDDVGEPPASDNRTQRKPLADRIRAPVAYDDLFEEGEIHEGEPQS

SEQ ID NO: 975 - protein, 263 aa, Zea mays
MGGSECALGDAAIGEETLNYDGDDVEMADADSDTEEARAAEVSAATGGSAGGVRQAEKDGPDGKKKRKKRRNKGKKNKGRQDGAPTNIADINRFVLNTCKRLKEKKSYLVWNAVGCLGVTAVNDLVREVEAIQKCGGQTIADGSRFRTGGGILWNILKSREPKAYKEIMAKGKELEKQFRCTKRPQISRNEDASSQGSALIDDEIEARDQKETLDDPKQLDDVEIHVSDNKAQRKPLADRIRAPVAYDDLFEEGEIHDGEPRS

SEQ ID NO: 976 - protein, 263 aa, Zea mays
  misc_feature (94)..(94): Xaa can be any naturally occurring amino acid
MGGSECALGDAAIGEETLNYDGDDVEMADADSDTEEARAAEVSAATGGSAGGVRQAEKDGPDGKKKRKKRRNKGKKNKGRQDGAPTNIADINRXVLNTCKRLKEKKSYLVWNAVGCLGVTAVNDLVREVEAIQKCGGQTIADGSRFRTGGGILWNILKSREPKAYKEIMAKGKELEKQFRCTKRPQISRNEDASSQGSALIDDEIEARDQKETLDDPKQLDDVEIHVSDNKAQRKPLADRIRAPVAYDDLFEEGEIHDGEPRS

SEQ ID NO: 977 - protein, 378 aa, Zea mays
MATGGGSSRSDDVRGLKFGKKIYFEQDGGSGSGAGAVGGRKGKGVATGGARPASAASAAQPPRCQVDGCGVDLSAVKQYYCRHKVCNMHSKEPRVFVAGIEQRFCQQCSRFHQLHEFDQGKRSCRRRLIGHNERRRKPPPGPLTSRYGRLAASLQEPGRFRSFLLDFSYPRVPSSVRDAWPGIQHGGDRMLGTVQWHGHQEPPHPHRSAAAGYGNHAAYNCHGGLVAGGAPMLSSAAFELPPGGCVAGVAADSSCALSLLSTQPWDTTSHDHRSPAMPAAGAFDGTPVAPSVMASSYAASSAWTGSRDPAADGARNAQRLDDALHLVHPGSAAVHFSGELELALQGSGGPPHLPRVDHGGSGGGTFNHSTTSAMNWSL

SEQ ID NO: 978 - protein, 378 aa, Zea mays
  misc_feature (151)..(151): Xaa can be any naturally occurring amino acid
MATGGGSSRSDDVRGLKFGKKIYFEQDGGSGSGAGAVGGRKGKGVATGGARPASAASAAQPPRCQVDGCGVDLSAVKQYYCRHKVCNMHSKEPRVFVAGIEQRFCQQCSRFHQLHEFDQGKRSCRRRLIGHNERRRKPPPGPLTSRYGRLXASLQEPGRFRSFLLDFSYPRVPSSVRDAWPGIQHGGDRMLGTVQWHGHQEPPHPHRSAAAGYGNHAAYNCHGGLVAGGAPMLSSAAFELPPGGCVAGVAADSSCALSLLSTQPWDTTSHDHRSPAMPAAGAFDGTPVAPSVMASSYAASSAWTGSRDPAADGARNAQRLDDALHLVHPGSAAVHFSGELELALQGSGGPPHLPRVDHGGSGGGTFNHSTTSAMNWSL

SEQ ID NO: 979 - protein, 388 aa, Sorghum bicolor
MATGGSGSDDVHGLTFGKKIYFEQDAAVAAAGGSGSGSATAAAGGRKGKGVATGGGRPASASAASATQPPRCQVDGCGVDLSAVKQYYCRHKVCYMHSKEPRVVVAGIEQRFCQQCSRFHQLPEFDQGKRSCRRRLIGHNERRRKPPPGPLTSRYGRLAASFQEPGRFRSFLLDFSYPRVPSSVRDAWQGVQPGGDRMLGTIQWHGNQEPHPHRSAAAGYGNHAYNCHGGLVAGASMLPSAFELPPGGCVAGVTTDSSCALSLLSTQPWDTTPQSGSHNRSPAMSAAASAFEGTPVAPSVMASSYTASSTWTASRDPADGARNAQQHHDDALHLVHPGPVHHGHFSGELELALQGSGPPPPPNMPHVDHGSSSGTFSHSTTNAMNWSL

SEQ ID NO: 980 - protein, 383 aa, Zea mays
MATGGGGGSDDFHGLTFGQKIYFEQDAGAAGGSATGGRKGKGAAASASAAQPPRCRVDGCGVDLSAVKQYYCRHKVCYMHSKEPRVFVAGIEQRFCQQCSRFHQLPEFDQGKRSCRRRLIGHNERRRKPPPGPLTSRYGPLAASLVQEPGRFRSFLLDFSYPRVPSSVRDDAWQWQGMQHGGDRMLLGTASAIQWHGNQEPHPPHRSAAAGYGNHAYNNCHGGGGLVAAAAGASMLSSAFEPPPGGGGCVAGATAADSSCALSLLSTQPWDTPTQSGSSHHNRSPAMSAAAGAFEVAPSSVVASSYTASSSWSGSRDPADGARKNAQRHDDGLHLVHPPGPVHHGHFSGELELALQGSGPPHVDHGGGTCFSHSDTNAMNWSL

SEQ ID NO: 981 - protein, 439 aa, Zea mays
MGSFGMNWNQKDPMVWDWEHLVPSVSNAVTRHGSANSSGGTLTSNSELGHGSSKSSISASIDSPSGVGNSLEFNFAAVERHVKNTGTNGRVDDSGNSPSSMIAFNQGEPLISLKLGKRAYFENACGGQDAKVSAASDVTSAASVVKKTKVSQQNAKNWYCQVEGCKVDLSSAKDYNRKHKVCVVHSKATKVVVAGLERRFCQQCSRFHGLAEFDQNKRSCRRRLMHHNARRRKPQADTISFNSSTMFYDTRQRTNLFFSQPLYGQVRSNAGSSWDNLGGLKFMETKHPPVHPTKTASPDELHFSALQITSAAAHTGHHHDLDGFMAFKGTSTKVLNQGVEAWAAASSSNNGGPEGGRALSLLSDGSWGSSSAVIQQPTSHADAGALLPPLATVAVSNAAAAAGHPLDPSPGRFWPQDDHPPLVDGPATQIPELAHLRIW

SEQ ID NO: 982 - protein, 440 aa, Sorghum bicolor
MGSFGMNWNQKNSMVWDWEHLVPSVSNAVTRHGSANSSGGTLTSSSELGHGSSKSSISASIDSPSGVGNSLEFNFAAVQRHVKNTGTNGRVDDSGNSPSSMIAFSQGEPLISLKLGKRAYFENVCGGQEAKVSAPSDVTSAVTVVKKTKVSQQNAKNWYCQVEGCKVDLSSAKDYNRKHKVCVAHSKAPKVVVAGLERRFCQQCSRFHGLAEFDQNKRSCRRRLTHHNARRRKPQADAISFNSSRLSSMFYDTSHRTNLFFSQPLYGQVRSNAVSPWDNSGGFKFMETKHLSVQPTKTVGLDELHFSTPQISTSVVAHTGHHHNFDRFMPFKGTNTKVLNQVSGVEASATASNSNNGAPEPGRALSLLSDGSWGSNSAVIQQPPSHADAGALPPLATVAVSNTAARHPLDPSLGRFWQDDHPPLDGPAPQIQELAHLRTW

SEQ ID NO: 983 - protein, 383 aa, Zea mays; identical to SEQ ID NO: 980

SEQ ID NO: 984 - protein, 388 aa, Sorghum bicolor; identical to SEQ ID NO: 979

SEQ ID NO: 985 - protein, 378 aa, Zea mays; identical to SEQ ID NO: 977

SEQ ID NO: 986 - protein, 378 aa, Zea mays; identical to SEQ ID NO: 978
  misc_feature (151)..(151): Xaa can be any naturally occurring amino acid

SEQ ID NO: 987 - protein, 329 aa, Zea mays
PSTAPAPARCQVDGCNVDLTDVKPAYYCRHKVCKMHSKEPRVLVNGLEQRFCQQCSRFHQLPEFDQLKKSCRKRLAGHNERRRRPPPGPLASRYGRHAASLGEPGRLRSFMLDFSYPRVSSAMRGGFPAVRPGGERVPGGIQWQAGLDPRHHQGAVAGYGAHYGSEGGSSSSARPPVFPGPELPPGGCLAGVPADSSCALSLLSTQPWDAAHSHSHSHAAPTAGFDGGSPVAPSLMAASSYIAPSPWTETDSWGHEGGRSVPQLPPDDVPLGEVHSGSSSHHGQFSGELELALQGNRPAPGSAAPPAPRNNQGSAGTFDQAGNTMDWSL

SEQ ID NO: 988 - protein, 409 aa, Sorghum bicolor
MESGGASGGGGGGGGDDQLHGLKFGKKIYFEDAAAAGSSSGGGGGGSGNASATTAAPATQQPSPPQAASPRAASGGGGRRGRAAGGPSPAPAPARCQVDGCNVDLTDVKPYYCRHKVCKMHSKEPRVVVNGLEQRFCQQCSRFHQLPEFDQLKKSCRRRLAGHNERRRRPPPGPLATRYGRLAASFGEEPGRFRSFMLDFSYPRVPTAMRDGFPAVRPGERAPGSIQWQASLDPHHHQSAVAGYSAHSYGSQGSSSSRPPVFPGPEIPPGGCLAGVPSDSSCALSLLSTQPWDTTHSSGHSHAASMPATAGFDGNPVAPSLMASSYIAPSPWTDSRGHEGGRNVPQLPPDVPLSEVHSGSSSHHGQFSGELELALQGNRPAPGSAPAPRNDQGSTGAFDQSGNTMDWSL

SEQ ID NO: 989 - protein, 408 aa, Zea mays
MEAGGASGGDDGDGQLHGLKFGKKIYFEDAGGSSSSGGSGSASATAPPATQQPSPPAASPRAAPGGGRRGRAAAGGAGPSLPPAPPRCLVDGCNADLTDAKTYYCRHKVCEMHSKEPRVVVNGLELRFCQQCSRFHNLAEFDQQKKSCRKRLAGHNERRRRPPPGPLASRYGRLAAPLGEEPGGRFRSFMLDFSYPRVPSAMRDGFPAVRPGGERVPGSNIQWQAASLDPPPPHHQSAAAGYGAHSYGSPGSSSSSRPPVFPAGPELPPGGGCLAGVPTDSSCALSLLSTQPWDAAGHSAGHGHGHAASLPATAGFDGNPVAMASSYIAPPSPWTDSRAHEGGRRNVPQLPPDVPLGDVHSGPGTHHGQFSGELELALQGNRPAPAPRNGQGSAGAFDQAGSTTEWSL

SEQ ID NO: 990 - protein, 251 aa, Zea mays
MAAEAGPISKVLIVIAMQKEATPLVHKFNLVEAPAHQSTFPKGAPWVWYHGSYKGLHIDLVLPGMDAVLGVDSVGTVPVAVVTSFSIQTLKPDLIINAGTAGGFKAKGASITDVFLASDVAFHDRRIPIPIFDMYGTGARKTFAAPNILKELNLKVGKLSTGDSLDMCPQDKELILRNDATIKDMEGAAVAYVADMFSTPAIFVKAVTDIVDGVKPTYEEFLQNLIAVTTALELAVTKVVDFISGKRISDL

SEQ ID NO: 991 - protein, 251 aa, Zea mays
MAAEAGPISKVLIVVAMQTEAMPLVHKFKLVEAPAHESTFPKGAPWVRYHGNYKGLHIDLVLPGKDAVLGVDSVGTVSAALLTSFSIQTLKPDLIINAGTAGGFKAKGASIGDVFLASDVSFHDRRIPIPVFDMYGIGARKTSAVPNILKELNLKIGKLSTGDSLDMSPQDEKVILSNDATVKDMEGAAVAYVADMFSTPAIFVKAVTDIVDGEKPTSEEFLQNLIAVTAALDLAVTKVVDFISGKRISDL

SEQ ID NO: 992 - protein, 251 aa, Zea mays
MAAEAGPISKVLIVVAMQTEAMPLVHKFKLVEAPAHESTFPKGAPWVRYHGNYKGLHIDLVLPGKDAVLGVDSVGTVSAALLTSFSIQTLKPDLIINAGTAGGFKAKGASIGDVFLASDVSFHDRRIPIPVFDMYGIGARKTSAVPNILKELNLKIGKLSTGDSLDMSPQDEKVILSNDATVKDMEGAAVAYVADMFSTPAIFVKAVTDIVDGDKPTSEEFLQNLIAVTAALDLAVTKVVDFISGKRISDL

SEQ ID NO: 993 - protein, 251 aa, Sorghum bicolor
MAAEAGPISKVLVVVAMQTEAMPLVNKFKLVEAPAHESTFPKGAPWVRYHGNYKDLHIDLVLPGKDAAFGVDSVGTVSVALVTSFSIQTLKPDLIINAGTAGGFKAKGASIGDVFLASDVAFHDRRIPIPVFDMYGIGARKTFAAPNILKELNLKVGKLSTGDSLDMSPHDEEVILSNDATVKDMEGAAVAYVADMFSTPAIFLKAVTDIVDGEKPTTEEFLQNLIAVTAALDLAVTKVVDFISGKRISDL

SEQ ID NO: 994 - protein, 226 aa, Zea mays
MAAEAGPISKVLIVIAMQKEATPLVHKFNLVEAPAHQSTFPKGAPWVWYHGSYKGLHIDLVLPGMDAVLGVDSVGTVPVAVVTSFSIQTLKPDLIINAGTAGGFKAKGASITDVFLASDVAFHDRRIPIPVGKLSTGDSLDMCPQDKELILRNDATIKDMEGAAVAYVADMFSTPAIFVKAVTDIVDGVKPTYEEFLQNLIAVTTALELAVTKVVDFISGKRISDL

SEQ ID NO: 995 - protein, 259 aa, Oryza sativa Japonica Group
MAPPSDSDDSAPIPAGAISKLLIVIAMQTEALPLVNKFHLVEAEESIFPKGAPWIRYHGNYKGLHVDLVWPGKDPVLGVDCVGTVSAALVTYASIQSLKPDLIINAGTAGGFKAKGADIGDVYLASDVAFHDRRIPIPVFDMYGIGTRKTFATPNILKELNLKVGKLSTGDSLDMSPHDESAILNNDATVKDMEGAAVAYVADMFSTPAIFVKAVTDIVDGEKPTAEEFLQNLVAVTAALDKAVTEVVDFISGKCISDL

SEQ ID NO: 996 - protein, 259 aa, Oryza sativa
MAPPSDSDDSAPIPAGAISKLLIVIAMQTEALPLVNEFHLVEAEESIFPKGAPWIRYHGNYKGLHVDLVWPGKDPVLGVDCVGTVSAALVTYASIQSLKPDLIINAGTAGGFKAKGADIGDVYLASDVAFHDRRIPIPVFDMYGIGTRKTFATPNILKELNLKVGKLSTGDSLDMSPHDESAILNNDATVKDMEGAAVAYVADMFSTPAIFVKAVTDIVDGEKPTAEEFLQNLVAVTAALDKAVTEVVDFISGKCISDL

SEQ ID NO: 997 - protein, 256 aa, Oryza sativa Indica Group
PSDSDDSAPIPAGAISKLLIVIAMQTEALPLVNKFHLVEAEESIFPTGAPWIRYHGNYKGLHVDLVWPGKDPVLGVDCVGTVSAALVTYASIQSLKPDLIINAGTAGGFKAKGADIGDVYLASDVAFHDRRIPIPVFDMYGIGTRKTFATPNILKELNLKVGKLSTGDSLDMSPHDESAILNNDATVKDMEGAAVAYVADMFSTPAIFVKAVTDIVDGEKPTAEEFLQNLVAVTAALDKAVTEVVDFISGKCISDL

SEQ ID NO: 998 - protein, 265 aa, Hordeum vulgare subsp. vulgare
MAPPSSEEPAAASAEASAAGAISKVLVVIAMQTEALPLVTRFQLVEAAADESIFPKGAPWTRYHGEYKGLHIDLVWPGKDPLLGVDSVGTVSAALVTYASIQLLKPDLIINAGTAGGFKAKGAGIGDVFLASDVAFHDRRIPIPVFDSYGIGARKTFETPNIVKELNLKVGKLSTGDSLDMSPHDESAILSNEATVKDMEGAAVAYVADLFSTPAIFVKAVTDIVDGEKPTAEEFLQNLISVTMALDQAVLQVVDFISGKCISDL

SEQ ID NO: 999 - protein, 275 aa, Oryza sativa Indica Group
MAPPSDSDDSAPIPAGAISKLLIVIAMQTEALPLVNKFHLVEAEESIFPKGAPWIRYHGNYKGLHVDLVWPGKDPVLGVDCVGTVSAALVTYASIQSLKPDLIINAGTAGGFKAKGADIGDVYLASDVAFHDRRIPIPVFDMYGIGTRKTFATPNILKELNLKVGKLSTGDSLDMSPHDESAILNNDATVKGYGVVICRLKLASLFLFFQGAAVAYVADMFSTPAIFVKAVTDIVDGEKPTAEEFLQNLVAVTAALDKAVTEVVDFISGKCISDL

SEQ ID NO: 1000 - protein, 432 aa, Zea mays subsp. mays
MDWDLNAAGAWDLAELERDHAAAAPSSGGHAANAAAAGTGTESRPPAPGAAGAPAECSVDLKLGGMGECEPGAARREREAAAGAAKRPRPAGPGGQQQQQQCPSCAVDGCRADLGKCRDYHRRHKVCEAHSKTPVVVVAGREMRFCQQCSRFHLLAEFDADKRSCRKRLDGHNRRRRKPQPDTMASASFIASQQGTRFSPFAHPRLEASWPPGVMKTEESPYHITHQIPLGSSSSSRQQHFVALGAATPAYAKEGRRFPFLQEGEISFATGVVLEPPAAAPACQPLLRTGAPSESSGAGGSKMFSDQGLARVLDSDCALSLLSAPANSSGIDVSRMVRPTEHVPMAQQPVVPGLQFGSASWFPRPQASTGGSFVPSCPAAVEGEQQLNAVLGPNDSEVSMNYGGMFHVGGGSGGGEGSSDGGTSSSMPFSWQ

SEQ ID NO: 1001 - protein, 432 aa, Zea mays subsp. mays
MDWDLKAAGAWDLAELEQDHAAAAPSSGGHAANAAAAGTGTESRPPAPGAAGAPAECSVDLKLGGMGECEPGAARREREAAAGAAKRPRPAGPGGQQQQQCPSCAVDGCRADLGKCRDYHRRHKVCEAHSKTPVVVVAGREMRFCQQCSRFHLLAEFDADKRSCRKRLDGHNRRRRKPQPDTMASASFIASQQGTRFSPFAHPRLEASWPPGVMKNEESPYHITHQIPLGSSSSGNRQQHFVALGAATPAYAKEGRRFPFLQEGEISFATGVVLEPPASAPACQPLLRTGAPSESSGAGGSKMFSDQGLARVLDSDCALSLLSAPANSSGIDVSRMVRPTEHVPMAQQPVVPGLQFGSASWFPRPQASTGGSFVPSCPAAVEGEQQLNAVLGPNDSEVSMNYGGMFHVGGGSGGGEGSSDGGTSSSMPFSWQ

SEQ ID NO: 1002 - protein, 431 aa, Zea mays subsp. mays
MDWDLNAAGAWDLAELEQDHAAAAPSSGGHAANAAAAGTGTESRPPAPGAAGAPAECSVDLKLGGMGECEPGAARREREAAAGAAKRPRPAGPGGQQQQQCPSCAVDGCRADLGKCRDYHRRHKVCEAHSKTPVVVVAGREMRFCQQCSRFHLLAEFDADKRSCRKRLDGHNRRRRKPQPDTMASASFIASQQGTRFSPFAHPRLEASWPPGVMKTEESPYHITHQIPLGSSSSSRQQHFVALGAATPAYAKEGRRFPFLQEGEISFATGVVLEPPAAAPACQPLLRTGAPSESSGAGGSKMFSDQGLARVLDSDCALSLLSAPANSSGIDVSRMVRPTEHVPMAQQPVVPGLQFGSASWFPRPQASTGGSFVPFCPAAVEGEQQLNAVLGPNDSEVSMNYGGMFHVGGGSGGGEGSSDGGTSSSMPFSWQ

SEQ ID NO: 1003 - protein, 435 aa, Sorghum bicolor
MDWDLKAPGAWDLAELEHEQHAAATAAAAGPSGGHANAGVAGTGTGCRPPPGAGGAPAECSVDLKLGGLGEPGAAPPARREREAAAAAAAAAEHQQGQGQHQQQQCPSCAVEGCKADLSKCRDYHRRHKVCEAHSKTPVVVVAGREMRFCQQCSRFHLLAEFDADKRSCRKRLDGHNRRRRKPQPDTMASASFITSQQGTRFSPFAPPRLEASWPGVIKTEESPYYTHQIPLGSSSNRQQHFVGSTTPAYAKEGRRFPFLQEGEISFATGVVLEPPACQPLLKTVAVAPPESSSSSSAGGGNKMFSDGLTRVLDSECALSLLSAPANSSGIDVSRMVRPTEHVPMAQPVVSGLQFGSSSWFSPRPQASTGVTAGSGFPSCPAVVEGEQQQLNTVLSPHDNEVNYGGMFHVGGGSGGGGEGSSDGGTSSSMPFSWQ

SEQ ID NO: 1004 - protein, 301 aa, Sorghum bicolor
MPVLLREMEDHSVHPMSKSNHGSLSGNGYEMKHSGKKVCDKDSSSESDQSHQEASAVSESSPAEHTSTQSDNDEDHGKDNQNTMKPVLSLGKEGSAFLAPKLDYSPSFAYIPYTADACYGGVGVLTGYAPHAIVHPQQNDTTNSPGILPVEPTEEEPIYVNAKQYHAILRRRQTRAKLEAQNKMVKGRKPYLHESRHRHAMKRARGSGGRFLNTKQLQEQNQQYQALSSSMCSKIIGNSLISQSGPTCTPSSDTAGASTASQDRSCLPSVGFRPMTNFSEQGGGGSKLIVNSMQQRVSTIR

SEQ ID NO: 1005 - protein, 300 aa, Zea mays
MPVILREMEDHSVHPMSKSNHGSLSGNGYEMKHSGHKVCDRHSSSESDRSHQEASAASESSPNEHTSTQSDNDEDHGKDNQDTMKPVLSLGKEGSAFLAPKLHYSPSFACIPYTVDAYYSGVGVLTGYAPHAIVHPQQNDTTNTPGMLPVEPAEEPIYVNAKQYHAILRRRQTRAKLEAQNKMVKNRKPYLHESRHRHAMKRARGSGGRFLNTKQLQEQNQQYQASSGSLCSKIIGNSIISQSGPTCTPSSGTAGASTACQDRSCLPSVGFRPTTNFSDQGRGGLKLAVIGMQQRVSTIR

SEQ ID NO: 1006 - protein, 300 aa, Zea mays
MPVILREMEDHSVHPMSKSNHGSLSGNGYEMKHSGHKVCDRDSSSESDRSHQEASAASESSPNEHTSTQSDNDEDHGKDNQDTMKPVLSLGKEGSAFLAPKLHYSPSFACIPYTSDAYYSAVGVLTGYPPHAIVHPQQNDTTNTPGMLPVEPAEEPIYVNAKQYHAILRRRQTRAKLEAQNKMVKNRKPYLHESRHRHAMKRARGSGGRFLNTKQLQEQNQQYQASSGSLCSKIIANSIISQSGPTCTPSSGTAGASTAGQDRSCLPSVGFRPTTNFSDQGRGGLKLAVIGMQQRVSTIR

SEQ ID NO: 1007 - protein, 300 aa, Zea mays
MPVILREMEDHSVHPMSKSNHGSLSGNGYEMKHSGHKVCDRDSSSESDRSHQEASAASESSPNEHTSTQSDNDEDHGKDNQDTMKPVLSLGKEGSAFLAPKLHYSPSFACIPYTSDAYYSAVGVLTGYPPHAIVHPQQNDTTNTPGMLPVEPAEEPIYVNAKQYHAILRRRQTRAKLEAQNKMVKNRKPYLHESRHRHAMERARGSGGRFLNTKQLQEQNQQYQASSGSLCSKIIANSIISQSGPTCTPSSGTAGASTAGQDRSCLPSVGFRPTTNFSDQGRGGLKLAVIGMQQRVSTIR

SEQ ID NO: 1008 - protein, 301 aa, Zea mays
MCLLREMEDHYVHPKSKSNHGSLSGNGYEMKNPGHEVCDRDSSSESDRSHPEASAVSESSLDEHTSTQSDNDEDHGKDNQDTLKPVLSLGKEGSAFLAPKIDYNPSFAYIPYTADAYYGGVGVLTGYAPHTIVHPQQNDTTNSPVMLPAEPAEEEPIYVNAKQYHAILRRRQTRAKLEAQNKMVKGRKPYLHESRHRHAMKRARGSGGRFLNTKQQPQEQNQQYQASSGSMCSKTIGNSVISQSGPICTPSSDAAGASAASQDRGCLPSVGFRPTANFSEQGGGGSKLVVNGMQQRVSTIR

SEQ ID NO: 1009 - protein, 301 aa, Zea mays
MCLLREMEDHSVHPKSKSNHGSLSGNGYEMKNPGHEVCDRDSSSESDRSHPEASAVSESSLDEHTSTQSDNDEDHGKDNQDTLKPVLSLGKEGSAFLAPKIDYNPSFPYIPYTADAYYGGVGVLTGYAPHAIVHPQQNDTTNSPVMLPAEPAEEEPIYVNAKQYHAILRRRQTRAKLEAQNKMVKGRKPYLHESRHRHAMKRARGSGGRFLNTKQQLQEQNQQYQASSGSMCSKTIGDSVISQSGPICTPSSDAAGASAASQDRGCLPSVGFRPTANFSEQGGGGSKLVVNGMQQRVSTIR

SEQ ID NO: 1010 - protein, 301 aa, Zea mays
MCLLREMEDHSVHPKSKSNHGSLSGNGYEMKNPGHEVCDRDSSSESDRSHPEASAVSESSLDEHTSTQSDNDEDHGKDNQDTLKPVLSLGKEGSAFLAPKIDYNPSFPYIPYTADAYYGGVGVLTGYAPHAIVHPQQNDTTNSPVMLPAEPAEEEPIYVNAKQYHAILRRRQTRAKLEAQNKMVKGRKPYLRESRHRHAMKRARGSGGRFLNTKQQLQEQNQQYQASSGSMCSKTIGDSVISQSGPICTPSSDAAGASAASQDRGCLPSVGFRPTANFSEQGGGGSKLVVNGMQQRVSTIR

SEQ ID NO: 1011 - protein, 300 aa, Zea mays; identical to SEQ ID NO: 1006

SEQ ID NO: 1012 - protein, 300 aa, Zea mays; identical to SEQ ID NO: 1007

SEQ ID NO: 1013 - protein, 300 aa, Zea mays; identical to SEQ ID NO: 1005

SEQ ID NO: 1014 - protein, 301 aa, Sorghum bicolor; identical to SEQ ID NO: 1004

SEQ ID NO: 1015 - protein, 301 aa, Zea mays; identical to SEQ ID NO: 1008

SEQ ID NO: 1016 - protein, 301 aa, Zea mays; identical to SEQ ID NO: 1009

SEQ ID NO: 1017 - protein, 301 aa, Zea mays; identical to SEQ ID NO: 1010

SEQ ID NO: 1018 - protein, 275 aa, Zea mays
MLLPSSSSASASASASASKGNSFGKTVNDHLRSTLSFDNKQPPFASQNFDYGQTIACISYPYNRSRSGDVWAAYESRTSTATVFRSQIAGGGSSTRIPLPLELAENEPIYVNPKQYHGILRRRQLRAKLEAQNKLVRARKPYLHESRHLHAMKRARGSGGRFLNTKQLQQSHTALTRSNTTSGTSSSGSTHLRLGGGAAAAGDRSVLAPKTMASQDSSKKAVSSALAFTVTPMLRRDDGFLQHPSHLFSFSGHFGQASAQAGVHNGSQHRVPVMR

SEQ ID NO: 1019 - protein, 264 aa, Sorghum bicolor
MFLFLSISLLCNSFGNTVNDHMRSTLSFDNKQSPFASQNIDYGQTIACISYPYNHSGSGGVWAAYESGTTATTVFHSQISGGGARIPLPLELAENEPIYVNPKQYHGILRRRQLRAKLEAQNKLVKARKPYLHESRHLHAMKRARGSGGRFLNTKQFQQQQQSHTASTRSTTNGTSSSGSTHLRLGGGAAGDRSMLAPKTMASQDSSKKAVSSALAFTVTPMLHRDDAFLQHPSHYLSFSGHFGQASVQAGMHNGSQHRVPFMR

SEQ ID NO: 1020 - protein, 202 aa, Sorghum bicolor
MITGLNYNDYQISRGKELVFSAGLNEQCSFLKQGVYSEIYRVLKPGQYFALDEWCLTDRFDPNNGKHLAIKAEIELGDGLPDIRTTRQCVQAMKDAGFEVICAKDLAQDFPCPWYQMMDPNNFSWTSFQCTRPGRIITRAIVNALEFLRIAPAGSAGIYSFLTSASDGLLKGGREGIFTATFFVLARKPLNKETEIVNDGNL

SEQ ID NO: 1021 - protein, 254 aa, Zea mays
MKVLDVGCGIGGPLIEIARFSSTSITGLNNNDYHISRGKELIFSAGLSEQCCFLKGDFMDMPISDNTFDAAYAIQATCHAPDAQGVYSEVYRVLKPGQYFALDEWCLTDRFDPNNAKHLAIKAEIELGDGLPDIRTTRQCVQAMKDAGFEVVFAKDLAQVFPCPWYRVMDPTYFSWAHFQCTRPGRIVTRAIVNTLEFLRIAPAGSMGAYNVLMSASDGLLKGGREGIFTATFFVLGRKPLKEVDIVSLSRKLI

SEQ ID NO: 1022 - DNA, 1824 bp, Zea mays
gctaagccgaatcgagcagcagtagccaccttgccatggcgatgcaggctgctttcctcgcggggttctcgcagctcgccgcgcagccgagccgcgactgcgccgtggcagtggcgccgacgcgggtggccgttgctgcggtgggtagcgccaaggtgggcgcgcgggtaggcttgaaggcggggatcgccgcgcccgcgcccgcggcgggccgcggggtgcggtgccgcgcaagcctgatcgagcccgacggcgggcagctggtggacctagtggcgcccgaggagggcgggcggcgcgcggcgctccggcgggaggcggcggaactgccgcaccggctgcgcctcggccgcgtcgacaaggaatgggtccacgtcctcagcgaagggtgggcgagtccgctgcaagggttcatgcgcgagcatgagttcctccaaacacttcattttaatgccatccgcggccaggatggcaggatggtcaacatgtccgtccccatcgtgctctccgtaggggacgcacagcgaagggccatccaggccgacggcgccacgcgcgtcgcgctcgtcgacgaacgcgaccgccccatcgccgtcctcagcgacattgagatctataagcataataaggaagaaagaatagcacggacatgggggacaactgcacctggattaccttatgttgaggaggcaattaccaatgctggtgactggttgattggtggggacttggagattatagaaccaatcaagtacaatgatggtctagatcagtatcgcctgtctccagcacagctgcgtgaagagtttgccaggcgcaatgctgatgcagtatttgcctttcagcttcgcaatccagtacacaatgggcatgctctacttatgaccgacacacgcaaacgcctccttgagatgggttataaaaaccctgttcttctgctccatccactgggaggattcacaaaagcagatgatgtgcctcttagttggagaatgaagcaacatgagaaggttcttgaggaaggtgtcctcaacccagaatcaactgttgttgcgatcttcccctctcctatgcattatgctgggccaactgaggttcaatggcatgctaaggctcgtattaatgctggtgcaaacttctatatcgttggaagggatcctgctggtatgagccaccccacagagaaaagggacctctatgatgctgatcacggaaagaaggttttgagcatggctcctggccttgagaggctcaacatccttcctttcaaggtggctgcgtatgacacaaagcaaaagaaaatggatttctttgatccatcaaggaaagatgatttcctgttcatctctggcacaaagatgcgcactcttgccaagaaccgagagagtcccccagatggttttatgtgcccgggtggctggaaggtactcgttgaatactatgacagcttggtgccatctgagggcagcagcaagctgcgtgaaccaattgcagcctaaaatctggaaaatccttcatataaggaatgctactatatcttagcaagcggttctttgcgacatagaaccgatgctatatgattgtatactggctgtaagactgtaaaacactaggcttgattcggatgttaatgtgtgctttgtacccggtgtaccttctctgctggcagtgttgcacatgcactggagcacatcaaacgtttggtgttaataaggacaggctatgtatcctctgccagattgtacatatatacattgtggtgatatataattataaagctgacctctgccgtccgggctcgtagtgatgaacagttttatcact

SEQ ID NO: 1023 - DNA, 1878 bp, Zea mays
ccgcctttcacaaaaccaaacaaaacgcacccgcaatataaagaggagaccaaggcgtgaagtggaggaggcagaggtggacgaggcgcgccaccgcccgagccgaatcgagctgcagaaaccaccttggcatggcgacacaggccgctttcctcgcagggttctcgcagctcgccgcgcagccgggccgcgaccgcgccgtggcggtggcggtggcgccggcgccgggcccggcccgggtggccgttgcggcggtgggtagcgccaagttgggcgtgaaggcggggacgtccaggaccgcggcggtggcgcgcctcggggtgcggtgccgggccagcctgatcgagcccgacggcgggcggctggtggacctggtggcgcccgaggagggcgggcggcgcgcggcgctgcggcgggaggcggcggagctgccgcaccggctgcgcttgggccgcgtcgacaaggaatgggtccacgtcctcagcgaagggtgggcgagcccgctgcaagggttcatgcgcgagcatgagttcctccaagcacttcatttcaatgccatccgcggccaggatggcaggatggtcaacatgtccgtccccatcgtgctctctgtcggggacgcacagcgaagggccatccaggccgacggcgccacgcgcgtcgcgctcgttgacgagcgcgaccgccccatcgccgtcctcagcgacattgagatctataagcataataaggaagaaagggtagcacggacatgggggacaactgcacctggattaccttatgtcgaggaggcaattaccaatgctggtgactggttggttggtggggacttggaggttatagaaccaatcaagtacaacgatggtctagatcagtatcgcctgtctccagcacagctgcgtgaagagtttgccaggcgcaatgctgatgcagtatttgcctttcagcttcgcaatcctgtacacaatgggcatgctcttcttatgaccgacacacgcaaacgtctccttgagatgggttataaaaaccctgttcttctgctccatccactgggaggattcacaaaagcagatgatgtgcctcttagttggagaatgaagcaacatgagaaggttcttgaggaaggtgtcctcaacccagaatcaactgttgttgcgatctttccctctccaatgcattatgctgggccaactgaggtgcagtggcatgctaaggctcgtattaatgctggtgcaaatttctatattgttggaagggatcctgctggtatgagccatcccacggagaaaagggacctctatgatgctgaccacgggaagaaggttttgagcatggctcctggcctcgagaggctcaacatccttcctttcaaggtggctgcatatgacacaaagcaaaagaaaatggatttcttcgatccatcaaggaaagatgatttcctcttcatctctggcacaaagatgcgcactcttgccaagaaccgcgagagtcccccggatggttttatgtgcccgggtggctggaaagtgctcgttgaatactatgacagcttggtgccatccgagggcagcagcaagctgcgcgagccagttgcagcctgaaatatgggaagcgcttcagataaggaaccgtactatgtcagcacaagcggttctttgcgacatagaaccgttgttgtatgattgtatactggcttgtaagacttaaaaacactgggcttgatttggacgttaatgtgtgcattgtaactggtgtgccctatctgctgacagtgttgcacatcacatgtttggtgttaataaggacagactatgtatcatctgccagattgttgtacatatacattgtggtgatataaacatgaagctgtcttctgct

SEQ ID NO: 1024 - DNA, 1795 bp, Zea mays
gaatcgagcagcagtagccaccttgccatggcgatgcaggctgctttcctcgcggggttctcgcagctcgccgcgcagccgagccgcgactgcgccgtggcagtggcgccgacgcgggtggccgttgctgcggtgggtagcgccaaggtgggcgcgcgggtaggcttgaaggcggggatcgccgcgcccgcgcccgcggcgggccgcggggtgcggttccgcgcaagcctgatcgagcccgacggcgggcagctggtggacctagtggcgcccgaggagggcgggcggcgcgcggcgctccggcgggaggcggcggaactgccgcaccggctgcgcctcggccgcgtcgacaaggaatgggtccacgtcctcagcgaagggtgggcgagtccgctgcaagggttcatgcgcgagcatgagttcctccaaacacttcattttaatgccatccgcggccaggatggcaggatggtcaacatgtccgtccccatcgtgctctccgtaggggacgcacagcgaagggccatcctggccgacggcgccacgcgcgtcgcgctcgtcgacgaacgcgaccgccccatcgccgtcctcagcgacattgagatctataagcataataaggaagaaagaatagcacggacatgggggacaactgcacctggattaccttatgttgaggaggcaattaccaatgctggtgactggttgattggtggggacttggagattatagaaccaatcaagtacaatgatggtctagatcagtatcgcctgtctccagcacagctgcgtgaagagtttgccaggcgcaatgctgatgcagtatttgcctttcagcttcgcaatccagtacacaatgggcatgctctacttatgaccgacacacgcaaacgcctccttgagatgggttataaaaaccctgttcttctgctccatccactgggaggattcacaaaagcagatgatgtgcctcttagttggagaatgaagcaacatgagaaggttcttgaggaaggtgtcctcaacccagaatcaactgttgttgcgatcttcccctctcctatgcattatgctgggccaactgaggttcaatggcatgctaaggctcgtattaatgctggtgcaaacttctatatcgttggaagggatcctgctggtatgagccaccccacagagaaaagggacctctatgatgctgatcacggaaagaaggttttgagcatggctcctggccttgagaggctcaacatccttcctttcaaggtggctgcgtatgacacaaagcaaaagaaaatggatttctttgatccatcaaggaaagatgatttcctgttcatctctggcacaaagatgcgcactcttgccaagaaccgagagagtcccccagatggttttatgtgcccgggtggctggaaggtactcgttgaatactatgacagcttggtgccatctgagggcagcagcaagctgcgtgaaccaattgcagcctaaaatctggaaaatccttcatataaggaatgctactatatcttagcaagcggttctttgcgacatagaaccgatgctatatgattgtatactggctgtaagactgtaaaacactaggcttgattcggatgttaatgtgtgctttgtacccggtgtaccttctctgctggcagtgttgcacatgcactggagcacatcaaacgtttggtgttaataaggacaggctatgtatcctctgccagattgtacatatatacattgtggtgatatataattataaagctgacctccaaaaaaaaaaaaaaaa

SEQ ID NO: 1025 - DNA, 1790 bp, Zea mays
ggggtggacgaggcgcgccaccggccgagccgaatcgagctgcagaaaccaccttggcatggcgacacaggccgctttcctcgcggggttctcgcagctcgccgcgcagccgggccgtgaccgcgccgtggcggtggcggtggcgccggcgccgggcccggcccgggtggccgttgcggcggtgggtagcgccaagttgggcgtgaaggcggggacgtccaggaccgcggcggtggcgcgcctcggggtgcggtgccgggccagcctgatcgagcccgacggcgggcggctggtggacctggtggcgcccgaggagggcgggcggcgcgcggcgcttcggcgggaggcggcggagctgccgcaccggctgcgcctcggccgcgtcgacaaggaatgggtccacgtcctcagcgaagggtgggcgagtccgctgcaagggttcatgcgcgacgatgagttcctccaaacacttcactttaatgccatccgcggccaggatggcaggatggtcaacatgtccgtccccatcgtgctctccgtaggggacgcacagcgaagggccatccaggccgacggcgccacgcgcgtcgccgtcgtcgacgaacgcgaccgccccatcgccgtcctcagcgacattgagatctataagcataataaggaagaaagaatagcacggacatgggggacaactgcacctggattaccttatgttgaggaggcaattaccaatgctggtgactggttgattggtggggacttggaggttatagaaccaatcaagtacaatgatggtctagatcagtatcgcctgtctccagcacagctgcgtgaagagtttgccaggcgcaatgctgatgcagtatttgcctttcagcttcgcaatccagtacacaatgggcatgctcttcttatgaccgacacacgcaaacgtctccttgagatgggttacaaaaaccctgttcttctgccccatccactgggaggattcacaaaagcagatgatgtgcctcttagttggagaatgaagcaacatgagaaggttcttgaggaaggtgtcctcaacccagaatcaactgttgttgcgatctttccctctccaatgcattatgctgggccaactgaggtgcagtggcatgctaaggctcgtattaatgctggtgcaaatttctatattgttggaagggatcctgctggtatgagccatcccacggagaaaagggacctctatgatgctgaccacgggaagaaggttttgagcatggctcctggcctcgagaggctcaacatccttcctttcaaggtggctgcatatgacacaaagcaaaagaaaatggatttctttgatccatcaaggaaagatgatttcctcttcatctctggcacaaagatgcgcactcttgccaagaaccgagagagtcccccagatggttttatgtgcccgggtggctggaaggtactcgttgaatactatgacagcttggtgccatctgagggcagcagcaagctgcgtgaaccaattgcagcctaaatctggaaaatccttcatataaggaatgctactatatcttagcaagcggttctttgcgacatagaaccgatgctatgtgattgtatactggctgtaagactttaaaacactaggcttgattcggatgttaatgtgtgctttgtacccggtgtaccttctctgctggcagtgttgcacatgcactggagcacatcaaacgtttggtgttaataaggacaggctatgtatcctctgccagatgtacatatatacattgtggtgt

SEQ ID NO: 1026 - DNA, 1590 bp, Oryza sativa Japonica Group
gagagcaaatcgaggtagccatggcgatgcaggccgccttcgccgcctcgatgttcccgcagctggcgcagcggaggggaagcgatcgcgcggtggtggtggcgccgccggcgccggcgccggtgagggtggcgatgaggagcggtggggcggcggcggcggcggcgagaggggtgaggtgcagggcgagcctgatcgagcccgacggggggaggctggtggagctggtggtgccggaggagggagggcggcgggaggcggcgcggcgggaggcggcggcgctggcgcaccgggtgaggctggggcgggtggagacggagtggctgcacgtgctgagcgaagggtgggcgagcccgctgcgagggttcatgcgcgaggccgagttcctccaagcacttcatttcaacgccatccgcggcggagacggggccatggtcaacatgtccgtgcccatcgtcctccccctcggtgacgcccagcgccgcgccatcgaggcgtccggcgcccgccgcgtcgcgctcgtcgacgccgccgaccgccccctcgccgtcctcagcgacattgagatctacaagcataacaaagaagaaaggattgcacggacatggggaacaactgcacctgggctgccttatgttgatgaggcgattacaaatgctggtgattggttaattggtggtgacttggaggttatagaaccaatcaagtacaatgatggtcttgatcagtatcgcttgtctccagcccagctgcgtgaagagtttgccagacgcaatgctgatgcggtattcgcgtttcagcttcgcaatcctgtacacaatggacatgctttgctcatgactgatacacgcaaacgccttcttgagatgggttacaaaaatcctgttcttctgcttcatccattgggaggattcacaaaagcagatgatgtgcctcttagttggagaatgaagcagcatgaaaaggttcttgaggaaggtgtcctcaacccagaatcaactgtcgttgcaatcttcccctctccaatgcattatgcagggccaactgaagtgcaatggcatgctaaggctcgtataaatgctggtgcaaacttctacatagttggaagagatcctgctggtatgggccacccaactgaaaagagggacctgtatgatgctgatcatgggaaaaaggtgttgagcatggctcctgggcttgagaagctcaatatccttcctttcaaggtggctgcatatgacacaaagcaaaagaaaatggactttttcgatccatcaaggaaagatgatttcctgttcatctctggcacaaagatgcgtactcttgccaagaactgccagagcccccctgacggattcatgtgcccgggtggctggaaggtccttgttgaatactacgacagcttgacgccatcagcggacagcagcaaactgcgcgaggcggttgcggcctagaaagctgaaactacctcaaataagcaagaacattgcatcttgcaactgtaaaatggttctttcagagagagaaccaatggtatatgtgtatactactggtcgcaaggcctaaacatttgggtttgattggaagcgc

SEQ ID NO: 1027 - DNA, 1721 bp, Hordeum vulgare subsp. vulgare
gagatcgtcagcaagaagcatcagcactaccagccatggcgacgcaggccgccttcgcggtgaggttcccgcagctggcgcggcccagcagggggcagggacagccggcgccggcgccggcgcgggtcgcggtgaggggcgttggcagggccgcggcggcggcggcgcgcggggtgcggtgccgggccggcggcctgatcgagccggacgggggcaggctggtggagctggtggcgcccgaggagggcgggcggcgggcggcgctgcggcgggaggcggcggcgctgccgcaccgggtgcgcctgggccgcgtggacaccgagtggctgcacgtgctcagcgagggctgggccagcccgctgcgcggcttcatgcgcgagaccgagttcctccaagcacttcatttcaacgccgtccgcggcgccgatggcagcctcgtcaacatgtccgtgcccatcgtcctcgccctcgacgacgcccagcgccgcgccatccaggcctccgccgccaccagcgtcgcgctcgtcgacgcccacgaccgccccgtcgccgtcctccgcgatattgagatctacaagcataacaaggaagaaagaattgcacggacttggggaacaactgcacgtggactgccgtacgtagaggaggcgattacaaacgctggtgattggttgattggtggagacctggaggttatagaaccaatcaagtataatgatggcctggatcagtatcgtttgtctccagcacagctgcgtgaagaatttgccaggcgcaatgcagatgcagtgtttgcttttcaacttcgtaaccctgtgcacaatgggcatgcgttgctcatgactgatacacggaggcgtcttcttgagatgggctacaaaaaccctgttcttcttctccatccactgggaggattcacaaaagcagatgacgtgcctcttagtgtgagaatgaagcagcatgagaaggttcttgaggaaggtgtcctaaacccagaatcaactgtggttgcaatcttcccctctccaatgcactatgctgggccaactgaggtgcagtggcatgctaaggctcgtataaatgctggtgcaaacttctatattgtcggaagagaccctgctggtatgggccacccgaccgaaaagagggacctttatgatgctgatcatgggaaaaaagtactgagcatggctcctgggcttgagaggctcaatatccttcctttcaaggtggccgcatacgacacaaagcataacaagatgaatttcttcgacccatcaaggaaagaggacttcctgttcatctctggcacaaagatgcgcagccttgccaagaatcgcgagagcccacccgacggttttatgtgcccgggtggctggaaggtcctcgtcgagtactacgacagcttggcgcctccagaaggcagcagcaaactgcgagaggcggttgcggcttagaagctgaaagacgcctcggataagtagtaccgatgtatctcgtgtcatgaaccaatgatatatgattgtatattggtggtaagaatcgacatttgggcatgaaccccagcactccccgtgtggtttgtactgcatattagtatctgctagcagtgttaccccctggagcccatcatgtgcttgtggtgccaataaggatgggttttgtatcctctttgccagatctgtacataactacatatacaatattgtggtaatttatct

SEQ ID NO: 1028 - DNA, 4479 bp, Oryza sativa Indica Group
tccgtggctctctctctctccccgcaggaagcaaccaatgcttcttcttcaaatccctcgaaatccattcaaaatccgatattcttactccgattttaagcccttttgagtaggagcccatcccataggtatatttccttttttaggttttttctcgtgtttgcatttagttatttccatccttctaaattgcagtgaaaacatgtaacaaggaatcgaatatacttgaaccattcatatcttcaacacataaatcaagtccatcaaaaccattctaaaatggattcatccaaaccattcattactatgtagttttctaataataccatagatattttatctgatctttatccgtttagtaccaattttctaaatacaaacttgttatattcatcataaaccacaatagtcatgaaattaataaaacaataatcctaacacatggaaattttcttatcgaacacttgaaattatttgttaaaaggcatgaaataaatagggctagctgcattgtcaagccaataagccggacatttcagttggcacgccatggaccctgacgtggcaataagttatacgttggcgctgctagactttgtccacgccaactactgccatggggcacctttgccacgttaagaccgatggcatgatagagtaatttggccatgcaggttataatggtgtgaaagaaaaggtttatttttaaagattagttcatatgaagtctattattaaaattatttattaaaaagtagaaggggacacatacacacgccctagctcattccagatgatccgaaatagtactccacccaaacaaaccaaaaaaaaaactcaagttcgcaggagatccaaaccttaaacatgacacacaagttaatacgcctgcttggcagtagaccagtccaaatccaaccctgtcccccaaattaacaaaccccagaaatgcccccaaaagacaacaaagcattcaccaacccccccaaccttaatcagcatttgattttgatccatcttcatcaacccccactattaatcctcttccccttccccccgcttttccgtccatgttcaccccgcccccatgccccgcaatcccatccaggttcatccgcctccccgtcttcttttttttttcattcatccgcaacccactgcgaacttgcgaaggccgcgggtacaagaaaagaagagaaaaataaaaaggagccgcattataagtaggtagtggtggtggtggaggaggaggagagcaaatcgaggtagccatggcgatgcaggccgccttcgccgcctcgatgttcccgcagctggcgcagcggaggggaagcgatcgcgcggtggtggtggcgccgccggcgccggcgccggtgagggtggcgatgaggagcggtggggcggcggcggcggcggcgagaggggtgaggtgcagggcgagcctgatcgagcccgacggggggaggctggtggagctggtggtgccggaggagggagggcggcgggaggcggcgcggcgggaggcggcggcgctggcgcaccgggtgaggctggggcgggtggagacggagtggctgcacgtgctgagcgaagggtgggcgagcccgctgagagggttcatgcgcgaggccgagttcctccaagcacttcatttcaacgccatccgcggcggagacggggccatggtcaacatgtccgtgcccatcgtcctccctctcggtgacgcccagcgccgcgccatcgaggcgtccggcgcccgccgcgtcgcgctcgtcgacgccgccgaccgccccctcgccgtcctcagcgagtgagacacccccctaccccacctcttcttgtttcccttgtttagttagttgcatttccctgttcagacgcttaattgcaattatttggttactaggagtgcttgctagaagagtaaaattactaattacatgagtggatggaatgtagatatattgattgttcgtgttggttggttgattctcacagttgtgggatgcctttggacctccaaaagccgtaatttttgtgcttgggttggaaattggaattgtgggggttgtagcctgaagtgttcagagaagttcataggtggtttcttcaattggaaacataatatgcagaaatacagattatgagtgtttctgtgcagttcccacatttcgtgagcttatccctcacaaacttgtgctctggttatatttagccttatgctagtaacattgttcacagcaacctggtcaatgatatatcattcatggcggaggttttatcttgggcgttaaactaattttaaggttgtggcattcctcttttgtcgattagactacaatatcatcatgcggataacctttgtcatgctatatcaggaactcaggacatctttatacatctcggtcgttttcaggtcatatttttttgagtcgtatatatataatacgatgatcggtaatgtcattggtagtccttataaatacatgttccgtagttcttttgccgtgttctctaggtattttagttttatctatattaaactgacaagtgatattatatttgtttcgttgttttttcgccgcgttctatgggtattttagtttaagcaactgacacatgatataatttacatcagaaagattattttttattcaccatttgtttataaggttttgtacacatccagctattgtaagatgttgttatagaagtgacgtaacaacgtcaacgtttacatctgtgtctaagaactcctcaagtcatgtgtgttcaaaacaatccgacttgatttagcatggttttagttctttttaattagttataccatggcattccctgacatttttttcttctttgttgtcagcattgagatctacaagcataacaaagaagaaaggattgcacggacatggggaacaactgcacctgggctgccttatgttgatgaggcgattacaaatgctggtgattggttaattggtggtgacttggaggttatagaaccaatcaagtacaatgatggtcttgatcagtatcgcttgtctccagcccagctgcgtgaagagtttgccagacgcaatgctgatgcggtattcgcgtttcagcttcgcaatcctgtacacaatggacatgctttgctcatgactgatacacgcaaacgccttctcgagatgggttacaaaaatcctgttcttctgcttcatccattgggaggattcacaaaagcagatgatgtgcctcttagttggagaatgaagcagcatgaaaaggtacgctttaagagtagcaatcgtactgtcaaatctttttagcaaatgcatgttggtgccttgttgttgatgaaaccatttgatttaattacactactgtaaggcccaattcatgcacaattttgacgcgtgtttattttggtaggttcttgaggaaggtgtcctcaacccagaatcaactgtcgttgcaatcttcccctctccaatgcattatgcagggccaactgaagtgcaatggcatgctaaggctcgtataaatgctggtgcaaacttctacatagttggaagagatcctgctggtatgggccacccaactgaaaagagggacctgtatgatgctgatcatgggaaaaaggtgttgagcatggctcctgggcttgagaagctcaatatccttcctttcaaggtatgtcattctaccagaccagatatcacattttttggatgcactagattgtgtagttcgctagcttactgtccatcttgcacatttgaatttggatgtcaagcaacatattttagttttcagataaaccttgttgtattctttttcttggcatgaccctgatttgttttatcaggtggctgcatatgacacaaagcaaaagaaaatggactttttcgatccatcaaggaaagatgatttcctgttcatctctggcacaaaggtaacatccatttcaatcctgttttggtacaccagttaattttgagcaccaatgtttttttccagcccagtcctaacaacattgcctgtgttatatagatgcgtactcttgccaagaaccgccagagcccccctgacggattcatgtgcccgggtggctggaaggtccttgttgaatactacgacagcttgacgccatcagcggacagcagcaaactgcgcgaggcggttgcggcctagaaagctgaaactacctcaaataagcaagaacattgcatcttgcaactgtaaaatggttctttcagagagagaaccaatggtatatgtgtatactactggtcgcaaggcctaaacatttgggtttgattggaagcgcattctggtgttgatttgtatgttgccctatcatctggtaatgctacattggaagctcatcatgctgttggtgttaataaggatgacctttgtgttgctctgctagatatgttcatatacaatgttggtggtatttatatagtgcttggtgtgtttgctattata

SEQ ID NO: 1029 - DNA, 1921 bp, Oryza sativa Japonica Group
cggtggcgctgtacgcgcgtgggggtggctgcggcgcgaaggcggccgcagcgcggcgctcggggcgcggcggtggtgggcggaggcgcgccgcggtcgtgctgctgctcgcgctggcgtacgtggcggggctgctcgtgttcgtgcttgcgggaggcggtggtgttggagttggagggcgcgtggaggtggggcgagaggtgggggtgatgacggtggcctcgctccggaggcggcgcgccgcggcggcggcggcgccgcagcccgggtcggtgtaccgcagccacctcgtgttcgagcggctctggccggacatccgcgacgacgccagctccgcctccgccgccgcctcgtcgctctcctccacttcttggcgtcgcagcatgttgatgacatcgcactatcagaatcctggggagctatggatgccttgtgtcaacaggaagctgattcgaccagagttgccaccttcaaatggttatctcatgatcgaagcgaatggtggtctgaatcaacagcgtctttcgatctgtgatgcagttgctgtggccagtttgcttaatgcaactcttgtgatcccagcatttcattttaatagtgtttggcgtgatcatagcaaatttggtgacatctttgacgaagaccattttattgagacactcaaagaacatgttagagttgtgaaggaattacctgtagatgttttgacgcgcttcgatcataatatcagcagcataccaaatatgagaactaaggcctattcatctccaaatcactatatgcagaaggtgcttccgaaattgctggagttaggggctgtgcgaattgccccattctcaaatagactggcacaatcagttccatcaaatctccaggccttgagatgttttgttaactaccaagcgttgagatttgctgagccaataagagttctcgcagaggatatggttgaaaggatggtaaaacggagtactttgactggtgggaagtttgtatcagtacatcttcgcttcgaagaggatatggtagctttttcatgctgtacatatgatggtggcttgaaggagaaaactgaaatggaaaatgctcgtgaaagaagctggagaggaaagtttcatcggcatggtcgagtgatcaatcctgaggcaaacagaagagatggaaaatgtcctcttactcctctagaggttggtatgatgctgcggggcatgggatttgacaataccacctccctctatgttgcttctggtaaaatatacaatgctgaaaaatacatggcaccgcttcgacagatgttccctcttttggcaacaaaggatactcttgctttgcctgaagagcttgctgagtttgaggggcactcatctcgattagcggcattagattactcggtctgtcttccgagtgaggtctttgtgacaactcaaggtgggaacttccctcactttctgatggggcacaggcgctacctgtttggcgggaatgcaaggacaataaagccagacaaacggaagctggttttatctttcgatgatccgaatatcagatggaatcggttcaagcgccacatgcaggatatactacaccatagtgacatgaggggcactgcattgaggaaacccaatgattccatatacaccttcccaatgcctgaatgtatgtgccagcaagatgggatgatgtaggccttgtatgattcatgcacatacgtcgaggaggaggaaatatgcaattttgtacactctgtaatgatctgtaggtagccaccaccaccgtacagaagcaatctttggccgggaatttgttgatttctgtctgtagattgtagagagaggagaggtgaaaattggttctggttgtagatatgatgaaacacatgctgttgacaagggacagcctgccctgtaaatgtatatgcagt

SEQ ID NO: 1030 - DNA, 1878 bp, Zea mays; identical to SEQ ID NO: 1023

SEQ ID NO: 1031 - DNA, 1790 bp, Zea mays; identical to SEQ ID NO: 1025

SEQ ID NO: 1032 - DNA, 1824 bp, Zea mays; identical to SEQ ID NO: 1022

SEQ ID NO: 1033 - DNA, 1795 bp, Zea mays; identical to SEQ ID NO: 1024

SEQ ID NO: 1034 - DNA, 1721 bp, Hordeum vulgare subsp. vulgare; identical to SEQ ID NO: 1027

SEQ ID NO: 1035 - DNA, 1590 bp, Oryza sativa Japonica Group; identical to SEQ ID NO: 1026

SEQ ID NO: 1036 - DNA, 4479 bp, Oryza sativa Indica Group; identical to SEQ ID NO: 1028

SEQ ID NO: 1037 - DNA, 1693 bp, Zea mays
gccacggccacggggggcgctctcgagagaaagatccagccccaaaggcccaaacccgaaacccctctcttcttcctccttccattggggtcgcgtccaacaagaggttggccagccatcccgcgcgagccacttcctctctcctccccatcggatccagcgccacgcggatccgcaaggcaatccatggcctctacccaggcggaagcggaggcgggggcaccggccccgcccgaggcggcggaggcgaaggagaagggcaagcagggcggggtgctggggagggtgtggcgggcgctcttcggtggccgcgaggacttcgagaagcggctgcagtacctgtccaaggaggaggcagccgtgcacgcgcggatgcgccggcggacgcagttctcgcgccgcgccgtgcggaacctcatcgtactctccgtcctcgccgaggtgttagctgttgtttatgccatcatgacgacaagaaatgaggatctaacttggcaaatgagggcaatacgagtgctacctatgttcattcttcctgctgtatcctctgtcatatattcaacagttgttaacttcacaaggatgtttgagcagaaagaccagaagacccttgaaaaattgagggctgagaggaaagccaagattgatgagcttaaagagagaacaaattattatctaacacagcagcttattcagaaatatgatcttgatccagccgcaaaggctgcagcagcttctgttttggcatctaagcttggggaggagactggcttaaaagttcatgttggagaagaaccaaagctggatgctgcagtggccagaagcaatgatgttgagatagtaccttcagatggtttgagaaacaggaagcaacccagtgcaagaggaagcaggactgggagccccacttctcataccccagcacagggaactgaaactaatctacctcctgctcctgctagtgctggcctggaaactgcaccagctccagtggtggtagagcatcatcaaggttcaggggctagtgatggtggtggatggattgcaaagattgctgccttacttgtgggggaggacccatcacagtcgtatgctttgatatgtggcagctgccatatgcataacggcttggcccgaaaggaagattacccacatgttacttactactgcccgcattgtcatgcattaaacacatcaaaacagtccatggggcaatactcaggctccaactcaggccggtcgacccctgttgttctggctgatggattatctacttccagttcagtacaagagactgaattgagtaacctgacgacattgcaggagctacccgaggaaggaaagacagacaagcaacaagtggaggcaagttgatggttcttatgacttgtactgttgatgtgtgtggaactagtttatctttagacttatatcgtcatgtgttcaactggtggagccacaaatttagcactgttgtaaattggaaatagtgagtgatatgatcctcggaagcatagcacgcaaaaacaagaaatgggacatggtgtacatccttgagtggatgattttttgttgtcatatagagcgcgaagtcttcttcctgcgagacaaaaagctatatgacgttcagacaagatggtggtgcaggatataacataagatcattgcttgttcagagaacagcgacatgtag

SEQ ID NO: 1038 - DNA, 1651 bp, Zea mays
atccagccccaaaggcccaaacccgaaacccctctcttcttcctccttccattggggtcgcgtccaacaagaggctggccagccatcccgcgcgagccacttcctctctcctccccatcggatccagcgccacgcggatccgcaaggcaatccatggcctctacccaggcggaagcggaggcgggggcaccggccccgcccgaggcggcggaggcgaaggagaagggcaagcagggcggggtgctggggagggtgtggcgggcgctcttcggtggccgcgaggacttcgagaagcggctgcagtacctgtccaaggaggaggcagccgtgcacgcgcggatgcgccggcggacgcagttctcgcgccgcgccgtgcggaacctcatcgtactctccgtcctcgccgaggtgttagctgttgtttatgccatcatgacgacaagaaatgaggatctaacttggcaaatgagggcaatacgagtgctacctatgttcattcttcctgctgtatcctctgtcatatattcaacagttgttaacttcacaaggatgtttgagcagaaagaccagaagacccttgaaaaattgagggctgagaggaaagccaagattgatgagcttaaagagagaacaaattattatctaacacagcagcttattcagaaatatgatcttgatccagccgcaaaggctgcagcagcttcagttttggcatctaagcttggggaggagactggcttaaaagttcatgttggagaagaaccaaagctggatgctgcagtggccagaagcaatgatgttgagatagtaccttcagatggtttgagaaacaggaagcaacccaatgcaagaggaagcaggactgggagccccacttctcataccccagcacagggaactgaaactaatctacctcctgctagtgctgtcctggaaactgcaccagctccagtggtggtagagcatcatcaagggtcaggggctagtgatggtggtggatggattgcaaagattgctgccttacttgtgggggaggacccatcacagtcgtatgctttgatatgtgggagctgccatatgcataacggcttgtcccgaaaggaagattacccacatgttacttactactgcccacattgtcatgcattaaacacatcaaagcagtccatggggcaatactcaggctccaactcaggccggtcgacccctgttgttctggctgatggattatctacttccagctcagtacaagagactgaattgagtaacctgacgacattgcaggagctacccgaggaaggaaagacagacaagcaacaagtggaggcaagttgatggttcttatgacttgtattgttgatgtgtgtggaactagtttatctttagacttatatcgtcatgtgttcaactggtggagccacagatttagcactgttgtaaattggaaatagtgagtgatatgatcgtcggaagcatagcacgcaaaaacaagaaatgggacatggtgtacatccttgagtggatgattttttgttgtcatatagagcgcgaagtcttcttcctgcgagacaaaaagctatatgacgttcagacaagatggtggtgcaggatataatataagatcattgcttgttcaaaaaaaaaaaaaaaa

SEQ ID NO: 1039 - DNA, 1698 bp, Zea mays
aattcgggtcgcgtccagttgctggcagccatctctcgcggtcgcggcctcgcgggcaacctcctgtcttctccccatcggatccagtgctgcggatccgcatttccgcaaggtagtcaatggcggcttccccggcggaggcgggggcacaggcgctgcccgaggcgacggaggcgaaggagaagggcaagcggggcggggtgctgaggagggtgtggcgggcgctcttcggtggccgcgaggacttcgagaagcggctgcagtacctatccaaggaggaggccgccgtgcacgcgcggatgcgccggcggacgcagttctcgcgccgcaccgtgcgaaacctcatcgtactctccgtcctcgccgaggtgttagctgttgtttatgccatcatgatgacaagaaatgaggatctaacttggcaaatgagggcaatacgggtgctacctatgttcgttcttcctgttgtatcctctgtcatatattcaacagttgttaacttcacaagaatgcttgagcggaaagatcagaagacccttgaaaaattgagggctgagagaaaagccaagattgatgagcttaaagagagaacaaactattatcttacccaacagcttattcagaaatatgatcttgatcctgccgcaaaggctgcagcagcttcagttttggcatctaagcttggggaggacactggcttaaaagttcatgttggagaagaaccaaagctggatgctgcagtggctagaagcaatgatgttgagatagtaccatcagatggtttgagaaacaggaaacaacccaatgcaagaggaagcaggaccgggagccctactgctgataccccagcacggggaactgaatccagtctaactgctggtgcagacctggaaactgctccagctcctttggtggtagaacatcatcaaggcttaggggctagtgatggtggtggatggattgcaaagattgctgccttacttgtggcagaggacccatcacagtcatatgctttgatatgtggcaactgccatatgcataatggcttggcccgaaaggaagattatccgcatgttacctactactgcccacattgtcatgcattaaacacatcaaagcagtccatgtggcaatactcgggctccaactcagggcggtcatcccctgttgttctggatgatggtctatccacttccagttcagtacaagagactgaattgagtaacctgacacacactgcaggagctacctgaggaaggaaatgcagagaagcaagaaaaggcaagttgatggttcacagaacttctattgatgtgtgtggaactacttaatctttagacgtatatcgtcatgtgttctggtggagccacagatttagcactgttgtaaattggaaatagtgactgatatgatccctcagatacttagcacacacccaaaagaagaaactagccatggtgacatccttgagtggatgattttttgttgtcaatagagcgcgaagacttcctgctgcatgacaagagtcacaagatggtgctgaaaagctatatatgataaatgaggcaatctaacaggtcagatgtgtaacgttcatacaagatggtgtaggatataacataatatcattgcttcgttttctatttctatcatttttatatgcacacgcttgttcagagaccaaaaaaaaaaaaaaaa

SEQ ID NO: 1040 - DNA, 1841 bp, Oryza sativa Japonica Group
atcccgaaggttacatcgaccaaaccaaaccccccctcccttctcctcgcgtcgacgcgtccatcctccagaaagagagagagagagctgcccgaggaggaggggggcaaccgtagcgaggcgttgctcgtgcggatccagagggggggcgcagatccggacgggccggggaatggcgtcgtcaccggaggcggcggcggtgggggaggaggagaaggggaaggggaagaaggaggaggggcggcggggcggcggggtgctggggaggatgtggcgcgcgctgttcggcgggcgcgaggactacgagaagcggctgcagtacctgtccaaggaggaggccgccgtgcacgcgcggatgcgccgccggacgcagttctcccgcaccgccgtccgcaacctcatcgtcctctccgtcctcgccgaggtggtggctattgtctatgccattatgacaacaagaaatgagcatataacatgggaaatgagggcaatccgagtgctgccgatgtttgtcttgcctgctgtatcttctgtgatatattcaacagttgtaaaattcacaaggatgcttgagcggaaagaccagaagacacttgaaaagctgagagctgagaggaaggccaagattgatgagctaaaagagagaactaattattacctcacccaacagcttattcagaaatatgacctagatccagctgcaaaggctgcggcagcatcggtattggcatctaagctcggagaggaaactggcttaaaagtacatgttggtgaagaaccaaaactggattcagcagttgctaggagcaatgatgtggagatatcaccatcagaagggctgagaaacaggaagcaatccaatgcaagaggtagccgaactggaggcaccactgctgctcaaaatccagctcagggagctgaatccagtctgacaagtagctctggcctggaacagcctccaatggtggtagaacattttcaaggctcaggggcaagtgatggtggatggatagcaaaaatcgctgctttacttgttggggaggatccgtcgcagtcgtacgctttgatatgtggaaactgtcatatgcataatggcttggccaggaaagaagattacccgcacattacctactactgcccccattgtcatgcgctgaacacatcaaagcaatctttggggcaacattctggctccaattcaggacggtcgacaccagttgctcctgctgatggaatatctgctagcagttcagtagtagagagtgaagtgagtaacatgactacaattcaggagctgaaaaatgaagaaaataccgagaagcaagaagtgcaagcaagttgatcggtcataaacttatactgctggtctgtgtgaaaattagcacatctatttggtgtatattgccgtattcaactggtttgaaccacagatgttgcactgctgtaaattggtaatagtgcctgatatgatccacctacagaggccgagtacaaaattttgagtcaccatctttacatccttggatgtatgaattttgttgtcaatagggtgggggacaaacgactacctgatgtctgacaatgtgagatttaaaagctagcggatggagccaagcagttcagttgggcatgaagcatggtgttggtctaaaacttagacacaatcaatcccccatatctgtttacccgtgctttatttgcagttgcaccttcggagatgaggaattttgagttctgttagtttctgaaccttgacgattaccatttccctgagatgtctgtaacttgcagcatttcgtctgcaactattggtttcttttgagtagtgaaaagtgacaacc

SEQ ID NO: 1041 - DNA, 1641 bp, Hordeum vulgare subsp. vulgare
ggagagagccagcaaggaggcagcgcggaggccaggccaccgtcgcgtggcgtcccaccaccaccctccctatcggatcccgctgcgcgcagatccgcgagccccggcaatggcttccacgccggcggacggagcaggcgagccggtcgaggccaagggcaaggggaaggaggagggggagaagaagaaggcgggaggaggggtgctggggaggatgtggcgcgggatcttcggcggccgcgaggactacgagaagcgcctgcagtacctgtccaaggaggaggccgccgtgcacgcgcggatgcgccgccggacccagttctcccgccgcaccgtccgcaacatcatcgtcctctccgtcctcgccgaggctgtggctgttggttatgccatcatgatgacaagagacgaagatctcacttggcaaatgagggcaattcgagtgctgcctatatttgttttgcctgccatatcgtctgtggtatattcagcagttgtaaacttcacaaggatgcgtgaacggaaagatgaaaaaacactggaaaaattgagagctgaaaggaaggccaagattgatgaactgaaagaacggacgaattattaccttacacaacagcttatccagaaatatgatcttgatccagctgcaaaagctgcagcagcttcggttttggcatctaagctgggggcggattctggcttaaaagtacatcttggggaagaaccaaattttgatgcggcagtggttatgagcaacaatgctgagatactgccatcagatggtgtgagaaacaggaagcaacccaatgcaagaggcagcaggactggaagcactacagctgctcatacttcggtacaaggtgctgaatctagctcaactcttaatgctggcctggaaaacgtacagcctacaagggttgtagaacattgtcaaggctctggggcaagtgatggtggatggattgcaaaaatcgctgccttactcgtaggggaggacccatcacagtcgtacgctctgatctgtggcaattgccatatgcataatggcttggcccggaaggaagattacccacacattacgtactattgcccacattgtcatgcgctaaacacatcaaagaactcgatggggcaatactcaggctccagctcaggcccatcgaccccagttgctcctgctgatggattatctgctacaagctcagtagtagagagtgaattaattaacatggctacagtggaggagttgccaaatgaagaacacacggagaagaaagtggaggcaagttgatgatggtccgttactatcactgttgatctttgtgaaattagttcatatcgcctcgtttgaactggtttgagctgcagatgtagcactgttgtaaaattggaaataggtgacttatatgatccacagcaacccagtacaataattatttagccagtttgtccatacatacttgagaggacgaattttgttggcaatggggactgctggagtggcgaatgacaacctgccgcctgacaagttgaggtcgggaagctatgaggtggaggcgagcaggtgagatcagtcggaacatagtagtggtgtaaaacatagatatgatcgatgcttctattttacccatatttgtgtcc

SEQ ID NO: 1042 - DNA, 2558 bp, Zea mays
atgcagttggatctgaacgtggccgaggcgccgccgccggtggagatggaggcgagcgactcggggtcgtcggtgctgaacgcgtcggaagcggcgtcggcgggcggcgcgcccgcgccggcggaggagggatctagctcaacgccggccgtgctggagttcagcatcctcatccggagcgatagcgacgcggccggcgcggacgaggacgaggacgccacgccatcgcctcctcctcgccaccgccaccagcaccagcagcagctcgtgacccgcgagctgttcccggccggcgccggtccgccggccccgacgccgcggcattgggccgagctcggcttcttccgcgccgacctgcagcagcaacaggcgccgggccccaggatcgtgccgcacccacacgccgcgccgccgccggccaagaagagccgccgcggcccgcgctcccgcagctcgcagtaccgcggcgtcaccttctaccgccgcacaggccgctgggagtcccacatctggtcagtactaccactgtctacaactagccacaccacaccgattgcttccgactctcattaatttctgacacaaactctccgtcttcctcctcttctcccgcgacgcagggattgcggcaagcaggtgtacctaggtgagcaagagcagatctcttttgcgttcccaaagatttttccccttttagttccttatcccatcccatctcgaatggcctagctaaccgattcagtggtggtccggctgctggccgatatacgcaggtggattcgacaccgctcacgccgctgcaaggcacgcactggactggacgcccagaattcttcgtcatgtgagtctctgaccgaattgattgattaacgagtctctggctcctggaactcgcagggcgtacgaccgggcggcgatcaagttccgcggcgtcgacgccgacatcaacttcaacctcagcgactacgaggacgacatgaagcagatggggagcctgtccaaggaggagttcgtgcacgtcctgcgccgtcagagcaccggcttctcgagaggcagctccaggtacagaggcgtcaccctgcacaagtgcggccgctgggaggcgcgcatggggcagttcctcggcaagaagtaagaaccaaccaacgcttcttttctttttcttttttttatagcatgcagtgatgattcaaccttagttgtgcctttcctcctaatcctatatatgtaggatttagtactggttgactatataagtatatatgtattgttcagtaaaagtatacataggttagctgcatgtttatgtatgtagctggttgtttcaatcagaagataaaaaaaaagggaagtagtggctagggaattcctccaatcctcaccggtgggaacgccgtgcttgggtgcaggtacatataccttgggctattcgacagcgaagtagaggctgcaaggttcttcatcttggattctgccgttcatatatgcataatcatgtcttttaatttccaaagggttgagtaccgactcgattcctcttcgtgtcttttttctttctttcttcgaaatccagagcctacgacaaggccgccatcaaatgcaatggcagagaggccgtgacgaacttcgagccgagcacgtatcacggggagctgccgactgaaggtacgtattttctttctgcatatatatatcttcaggtattattggctattaaactgcttggatcttactgcttcttctgcagttgctgatgtcgatctgaacctgagcatatctcagccgagcccccaaagagacaagaacagctgcctaggtctgcagctccaccacggaccattcgagggctccgaactgaagaaaaccaaggcaagcgctaacgatagatataccttgacaagctagtatcaaacaaaaccagtaaaaaaagtttactttcttgtcgaatttcattgcctacctgatgtacgtacttgtgcttctgcacaaaataacgaaatccttttgccctctgatgatgatgcagatcgacgatgctccctctgagctaccgggccgccctcgtcagctgtctcctctcgtggctgagcatccgccggcctggcctgcgcagccgcctcaccccttcttcgtcttcacaaaccatgaggttaggtgacagctactgatcgagatgcagcagcagttcaaacctgtctgttccaaggacctttaggccggattaccaaatcatcggtcaactgtcctgtctgttatatatttatgtgttaatttataatacaagtgtgactatttttcaaaccttccttcaaaatgcatgaaaagagttttttttaacgaaaggcgaaaagaaaatatgatacttgggacaggagcaagcttggatcatcagaaagtattattaattaggatcactgagctgttcattttgttcttgagtcaatcctaatcgtactatgtcagtgaatgaacttgtgttgcaccaatgcagatgagtgcatcaggagatctccacaggaggcctgcaggggctgttcccagctgggcatggcaggtgg

SEQ ID NO: 1043 - DNA, 2715 bp, Zea mays
atgcagctggatctgaacgtggccgaggcgccgccgccggtggagatggaggcgagcgactcggggtcgtcggtgctgaacgcgtcggaagcggcgtcggcgggcggcgcgcccgcgccggcggaggaggggtccagctcaacgccggccgcgctggagttcagcatcctcatccggagcgacagcgacgcggccggcgcggacgaggacgaggacgccacgccgtcgcctcctcctcgccaccgccaccagcaccagcagcagctcgtgacccgcgagctgttcccggctggcgccggcccgccggccccggcgccgcggcattgggccgagctcggcttcttccgcgccgacctgcagcagcaacaggcgccgggccccaggatcgtgccgcacccacacgccgcgccgccgccggccaagaagagccgccgcggcccgcgctcccgcagctcgcagtaccgcggcgtcaccttctaccgccgcacaggccgctgggagtcccacatctggtcagtactaccactgtctacaactagccacaccacaccgattgcttccgactctcattaatttctgacacaaactctccgtcttcctcctcttctcccgcgacgcagggattgcggcaagcaggtgtacctaggtgagcaagagcagatctcttttgcgttcccaaagattttccccttttagctcctcatcccatctcgaatggcctagctaaccgattcactggtggtccggctgctggccgatatacgcaggtggattcgacaccgctcacgccgctgcaaggcacgcactggactggacgcccagaattcttcgtcatgtgagtctctgaccggattggttgattgattgattaacgagtctctggctcctggaactcgcagggcgtacgaccgggcggcgatcaagttccgcggcgtggacgccgacatcaacttcaacctcagcgactacgaggacgacatgaagcagatggggagcctgtccaaggaggagttcgtgcacgtcctgcgccgccagagcaccggcttctcgagaggcagctccaggtacagaggcgtcaccctgcacaagtgcggccgctgggaggcgcgcatggggcagttcctcggcaagaagtaagaaccaaccaacgcttctttttttttatagcatgcagatgatgattcacacttagttgtgcctctcctcctaatcctatgtaggatttagtattggttgactacatatctattgttatatatgtattgttcagtaaaagtatacataggttagctgcatgtttatgtatgtagctggttgtttcaatcagaagataaaaagaaagggaagtagtggctagggaattcctccaatcctcaccggtgggaacgccgtgcttgggtgcaggtacatataccttgggctattcgacagcgaagtagaggctgcaaggttcttcatcttggattctgccgttcatatatgcataaccatgtcttttcatttccaaagggttgagtaccgactcgattcctctttttttttctttctttcttcgaaatccagagcttacgacaaggccgccatcaaatgcaatggcagagaggccgtgacgaacttcgagccgagcacgtatcacggggagctgccgactgaaggtacgtatttctttctgcatatatataatcttcaggtattattggctattaaactgcttggattttactgcttcttctgcagttgctgatgtcgatctgaacctgagcatatctcagccgagcccccaaagagacaagaacagctgcctaggtctgcagctccaccacggaccattcgagggctccgaactgaagaaaaccaaggcaagcgctaacgatagatataccttgacaagctagtatcaaacaaaaccagtattttttttactttcttgtcgaatttcattgcctacctgatgtacgtacttgtgcttctgcacagaataacgaaatccttttgccctctgatgatgatgcagatcgacgatgctccctctgacctcccgggccgccctcgtcggctgtctcctctcgtggctgagcatccgccggcctggcctgcgcagccgcctcaccccttcttcgtcttcacaaaccatgaggttaggtgacagctactgatcgagatgcagcagcagttcaaaacttagatccggtccctagctagataaaccctgcagttccaaggactgtcagagttagtcttagccgtatatcatcagatgatgacagcctgattgattgcctgaaggtgtttactttcagacaccagatttttagttggttttatccggttgttcttgtgcgcggctgtcctgtctgttccaaggacctttaggccggattaccaaatcatcggtcaactgtcctgtctgttatatatttatgtgtttataatacaagtgtgactatttttcaaaccttccttcaaaatgcatgaaaagagttttttttttaacgaaaggcgaaaagaaaatatgatactttgggacaggagcaagcttggatcatcagaaagtattattaattaggatcactgagctgttcattttgttcttgaatcaatcctaatcgtactatgtcagtgaatgaacttgtgttgcaccaatgcagatgagtgcatcaggagatctccacaggaggcctgcaggggctgttcccagctgggcatggcaggtgg

SEQ ID NO: 1044 - DNA, 2011 bp, Zea mays
agagctgcttaaaaagctttgcacaaaaatggcttcgcctgcgataccattcgcccccctcacgtcccatcgcgccgctcccttcgtcctggggtgtcctcctccatggccaccgccaccgccgcctgccgctcgcccacggccgccgccgccgcgccctgacgctgctgctgctgctagactgctagaggaggaggccggggcaggcagctcgcgagctcgatcgcctggcgggcccgagctggagtcgatggtgctggatctcaatgccgagtcgccgacgcccggctcggcctcggccgcctcgagctccagcgtcgtagtgggcgggggcttcttccggttcgacctgctcggagggacacccgacgaggagggttgctcgccctcgccacccatcgtgacgcgccagctcttccccttgccgtacccggacgctgcaggtagcaccgccgcctcgacggcgtcgaacgggtcgccgccgccggaggtggcgggggcatgggcgcgccgcccagcggatctcggggcgccggcgctggcacaggggaaggtgatgtctgcgccttcgtcgcccgcggttttgtctcctgccgccgggaagaagagccggcgggggcccaggtcgcggagctcgcaataccggggcgtcaccttctacaggaggaccggccgctgggagtcacacatctgggactgcgggaagcaggtctacctgggtggatttgatactgcgcacgccgcagcaagggcctatgatcgcgctgccatcaagttcagaggccttgacgccgacatcaacttccagttgaaggactatgaagatgacttgaagcagatgaggaattggactaaggaggagtttgttcacatactccgacgtcaaagcactgggtttgccagggggagctcaaagtaccgcggtgtgacactacacaagtgtggtcggtgggaagctcggatgggtcagcttctcggaaagaagtacatctaccttggtctatttgacagtgaaatcgaagcagcaagagcgtatgatagggcagccattcgcttcaatggaccggatgctgttaggaactttgattctgtttcctatgatggagatgtcccacttccacctgcaattgagaaagatgcagtggttgatggagacatccttgatctgaatttgaggatttcacaacctaacgtgcatgatctcagaagtgatggtaccctgactggttttggattaagttgtaattctcctgaagcttcaagctccattgtttctcagccaatgggcccccagtggcctgtccatcctcacagcagatcgatgcggccccagcatccacatctgtatgcatctccttgtccaggcttctttgtgaacctcagggaggcgcctatgcaggaagaggagaaccggtccgagccggcgtgtccccagccgttcccctcctgggcatggcaaacgcagggctcccgtgccccagttctccctgccaccactgcagcatcatcaggattctctaccgccgctgccaccggcgtggacgcggccacagccggccacagcgtgccgccgccgtctggtagcctccggcagttctcgggctaccaccagctccgcttccccccaaccgcctgacggagacagaccacctcctgttgagttggcggcggcggcggcgtctcatagctggccggtggttggctggctgcccatgcaacgccacgccggtgggtgcgggtcggtattcggtaacagtcgccactgttgggtatggttttgtgggactacagaggatgcagtgatctctcgctgctgctgtgtgctgtctctctcgctccctctacccacccacacctgtttgtaatatgaatttatcgccctctcgcgctcgtgattcgtccatcttcgtttcgttttgatggccaccggatgggatcatgagcgtgttgcgagaaattgtgtaataaaccatgcgtatttttatttatatttatttattgtgacgatggt

SEQ ID NO: 1045 - DNA, 1904 bp, Zea mays
accattcgcccccctcacgtcccatcgcgccgctcccttcgtcctggggtgtcctcctccatggccaccgccaccgccgcctgccgctcgcccacggccgccgccgccgcgccctgacgctgctgctgctgctagactgctagaggaggaggccggggcaggcagctcgcgagctcgatcgcctggcgggcccgagctggagtcgatggtgctggatctcaatgccgagtcgccgacgcccggctcggcctcggccgcctcgagctccagcgtcgtagtgggcgggggcttcttccggttcgacctgctcggagggacacccgacgaggagggttgctcgccctcgccacccatcgtgacgcgccagctcttccccttgccgtacccggacgctgcaggtagcaccgccgcctcgacggcgtcgaacgggtcgccgccgccggaggtggcgggggcatgggcgcgccgcccagcggatctcggggcgccggcgctggcacaggggaaggtgatgtctgcgccttcgtcgcccgcggttttgtctcctgccgccgggaagaagagccggcgggggcccaggtcgcggagctcgcaataccggggcgtcaccttctacaggaggaccggccgctgggagtcacacatctgggactgcgggaagcaggtctacctgggtggatttgatactgcgcacgccgcagcaagggcctatgatcgcgctgccatcaagttcagaggccttgacgccgacatcaacttccagttgaaggactatgaagatgacttgaagcagatgaggaattggactaaggaggagtttgttcacatactccgacgtcaaagcactgggtttgccagggggagctcaaagtaccgcggtgtgacactacacaagtgtggtcggtgggaagctcggatgggtcagcttctcggaaagaagtacatctaccttggtctatttgacagtgaaatcgaagcagcaagagcgtatgatagggcagccattcgcttcaatggaccggatgctgttaggaactttgattctgtttcctatgatggagatgtcccacttccacctgcaattgagaaagatgtggttgatggagacatccttgatctgaatttgaggatttcacaacctaacgtgcatgatctcagaagtgatggtaccctgactggttttggattaagttgtaattctcctgaagcttcaagctccattgtttctcagccaatgggcccccagtggcctgtccatcctcacagcagatcgatgcggccccagcatccacatctgtatgcatctccttgtccaggcttctttgtgaacctcagggaggcgcctatgcaggaagaggagaaccggtccgagccggcgtgtccccagccgttcccctcctgggcatggcaaacgcagggctcccgtgccccagttctccctgccaccactgcagcatcatcaggattctctaccgccgctgccaccggcgtggacgcggccacagccggccacagcgtgccgccgccgtctggtagcctccggcagttctcgggctaccaccagctccgcttccccccaaccgcctgacggagacagaccacctcctgttgagttggcggcggcggcggcgtctcatagctggccggtggttggctggctgcccatgcaacgccacgccggtgggtgcgggtcggtattcggtaacagtcgccactgttgggtatggttttgtgggactacagaggatgcagtgatctctcgctgctgctgtgtgctgtctctctcgctccctctacccacccacacctgtttgtaatatgaatttatcgccctctcgcgctcgtgattcgtccatcttcgtttcgttttgatggccaccggatgggatcatgagcgtgttgcg

SEQ ID NO: 1046 - DNA, 1922 bp, Zea mays
accattcgcccccctcacgtcccatcgcgccgctcccttcgtcctggggtgtcctcctccatggccaccgccaccgccgcctgccgctcgcccacggccgccgccgccgcgccctgacgctgctgctgctgctagactgctagaggaggaggccggggcaggcagctcgcgagctcgatcgcctggcgggcccgagctggagtcgatggtgctggatctcaatgccgagtcgccgacgcccggctcggcctcggccgcctcgagctccagcgtcgtagtgggcgggggcttcttccggttcgacctgctcggagggacacccgacgaggagggttgctcgccctcgccacccatcgtgacgcgccagctcttccccttgccgtacccggacgctgcaggtagcaccgccgcctcgacggcgtcgaacgggtcgccgccgccggaggtggcgggggcatgggcgcgccgcccagcggatctcggggcgccggcgctggcacaggggaaggtgatgtctgcgccttcgtcgcccgcggttttgtctcctgccgccgggaagaagagccggcgggggcccaggtcgcggagctcgcaataccggggcgtcaccttctacaggaggaccggccgctgggagtcacacatctgggactgcgggaagcaggtctacctgggtggatttgatactgcgcacgccgcagcaagggcctatgatcgcgctgccatcaagttcagaggccttgacgccgacatcaacttccagttgaaggactatgaagatgacttgaagcagatgaggaattggactaaggaggagtttgttcacatactccgacgtcaaagcactgggtttgccagggggagctcaaagtaccgcggtgtgacactacacaagtgtggtcggtgggaagctcggatgggtcagcttctcggaaagaagtacatctaccttggtctatttgacagtgaaatcgaagcagcaagagcgtatgatagggcagccattcgcttcaatggaccggatgctgttaggaactttgattctgtttcctatgatggagatgtcccacttccacctgcaattgagaaagatgtggttgatggagacatccttgatctgaatttgaggatttcacaacctaacgtgcatgatctcagaagtgatggtaccctgactggttttggattaagttgtaattctcctgaagcttcaagctccattgtttctcagccaatgggcccccagtggcctgtccatcctcacagcagatcgatgcggccccagcatccacatctgtatgcatctccttgtccaggcttctttgtgaacctcagggaggcgcctatgcaggaagaggagaaccggtccgagccggcgtgtccccagccgttcccctcctgggcatggcaaacgcagggctcccgtgccccagttctccctgccaccactgcagcatcatcaggattctctaccgccgctgccaccggcgtggacgcggccacagccggccacagcgtgccgccgccgtctggtagcctccggcagttctcgggctaccaccagctccgcttccccccaaccgcctgacggagacagaccacctcctgttgagttggcggcggcggcggcgtctcatagctggccggtggttggctggctgcccatgcaacgccacgccggtgggtgcgggtcggtattcggtaacagtcgccactgttgggtatggttttgtgggactacagaggatgcagtgatctctcgctgctgctgtgtgctgtctctctcgctccctctacccacccacacctgtttgtaatatgaatttatcgccctctcgcgctcgtgattcgtccatcttcgtttcgttttgatggccaccggatgggatcatgagcgtgttgcgaaaaaaaaaaaaaaaaaa

SEQ ID NO: 1047 - DNA, 747 bp, Oryza sativa Japonica Group
ctcctctattgcagccgccgccgctcccagctcgcgctcccctcgccgccgcagccgccgccgcctcgcctcctcggagatcttcgctgcccttccgtcaacatggggaagacacgtggtatgggagctgggcgcaagctcaagacccaccgcaggaaccagagatgggcagacaaggcctacaagaagagccacttgggtaatgagtggaagaaaccctttgctgggtcatctcatgccaagggcatcgttctggagaagattggtattgaggccaagcagcccaactctgccatccgtaagtgtgctcgtgtgcagcttgtgaagaatgggaagaagattgctgcctttgtgcccaatgacggttgcctgaacttcattgaggaaaatgacgaggtgttgattgctggatttggtcgtaagggccatgctgtgggagatattcctggtgtccggttcaaggtcgtcaaggtctctggtgtgtctctgcttgctctcttcaaggagaagaaggagaagccgaggtcttagattactggtacatcttggttggcaagcatggaatagacagaatgaaaggctttagatgctcaagaatgaaggctttagatgctcaagaagatggttccttgctatgtttaaagtgcgctctttatattgttaacttaagattgtgttggtaaaaaccatgccttgtcagatttttgcttctgttaaggggaaagtactgtgctgagctattttctc

SEQ ID NO: 1048 - DNA, 945 bp, Zea mays
atttgcatctgagttcctgattgttgtattccagtttcttctgtgagttttgtgggatcgcgaggaagaactagaaggatgtcgtgctgcggaggcaactgcgggtgcggcgccggctgcaagtgcggcagcggctgcggagggtgcaagatgtacccggacatggctgagcaggtgaccaccactacccagactctcatcatgggtgttgcaccctcctgccgccgccgccgctcccgctcccagctcgtgttccgcttcttgcagccgtcgccgcgaagcgctccagagaacttccgtcaacatggggaagacacgtggtatgggagccgggcgcaagctcaagacccaccgcaggaaccagcggtgggctgacaaggcatacaagaagagccatttgggcaatgagtggaagaaacccttcgctgggtcatcccatgccaagggcattgtcctggagaagattggtattgaggccaagcagcccaactccgctatccgtaagtgtgctcgtgttcagcttgttaagaatggcaagaagattgctgccttcgtgccaaatgacggttgtttgaactacattgaggaaaatgatgaggtcttgattgctggatttggtcgtaagggccacgctgtgggagatattcctggtgtccggttcaaggtcgtcaaggtttccggtgtgtctctgcttgcccttttcaaggagaagaaagagaagccaaggtcttagattgctcttgctaccaaaatcagcaagcgtggagttgaaacgggagggcgttagatgattaagaagaatggttgcttgctatgtttgcagtgcattcgtgcaattgttaacctaagattttgttggtgaaaacgatttcttttcagacttgcttctgttgagtgctatcattccatatcaatgtacttcctcttctaaaaaaaaaaaaaaaa

SEQ ID NO: 1049 - DNA, 877 bp, Zea mays
atatttttttttttcttgcccctctcgatcccgccgccgacgccgacgccgcagccgcagccttagccttgccttcgaactcgaagcccgttgcatccggctaccgcagcgtcgccaaccgtcacagccggtctcctccctccgctaccatggggaagacacgcggtatgggagctgggcgcaagctcaagacccaccgcaggaaccagaggtgggctgacaaggcatacaagaaaagccacttgggcaatgagtggaagaaaccttttgctgtatcatctcacgccaagggcatcgttctggagaagattggtattgaggccaagcagccgaactctgccatccgtaagtgtgcccgtgttcagctggtgaagaatgggaaaaagattgctgcctttgtgccaaatgatggttgcctaaactacatcgaggagaatgatgaggtgttgattgctgggtttggtcgtaagggccatgctgtgggagatatccctggtgtcaggttcaaggttgtgaaggtatctggtgtgtcgctgctcgcgctcttcaaggagaagaaggagaagccaaggtcttagatcactttcgatagtcaagaatggagtaaactgacaggctctactatggagtaaactgccaaggttttagatcactttcgatagtgaggttcaaggttgtgaagtttagcgacagagctgttaattctgagctgtactttttgttaacattgctatcgagactcgagagttttgttcccattttgaagtattaatattgcatcggcatgtgccgattcttacmaaaaaaaaaaaaaaaaaaaaaaaaaaacaaaaaaaaaaaaaaaaaaaaaaaaaaaaaaggaaaaaaaaaaaaaaaa

SEQ ID NO: 1050 - DNA, 429 bp, Elaeis guineensis
atggggaagactcgtggtatgggagctgctcgcaagctcaaaacccacaggaggaggcaaagatgggcagacaaagcatacaagaaaagccatcttggcaatgagtggaagaagccctttgctggttcttcacatgccaagggcattgtccttgagaagattggcattgaagctaagcaacccaactctgctatccgaaagtgtgccagagttcagcttataaagaatgggaagaaaattgcggcttttgtgccaaatgatggttgcttgaacttcattgaagaaaatgatgaagtattgattgctggatttgggcggaagggtcatgcagttggtgatattcctggagtaaggttcaaggttgtgaaggtttctggtgtgtcgctgctggcactcttcaaggaaaagaaagagaagccgcggtcttaa

SEQ ID NO: 1051 - DNA, 429 bp, Elaeis guineensis
atggggaagactcgtgggatgggagctgctcgcaagctcaaaactcacaggaggcggcaaagatgggcagacaaagcatacaagaagagccatcttggcaatgagtggaagaagccctttgctggttcttcacatgccaagggcattgtccttgaaaagatcggcatcgaagccaagcagcccaactctgccatccgaaagtgtgccagagttcagcttataaagaatgggaagaaaattgcagcctttgtgccaaatgatggttgcttaaactacatcgaagaaaatgatgaagtgttgattgctgggtttggacggaaggggcatgctgttggtgatattcctggagtaaggttcaaggttgtgaaggtttctggtgtgtcactactggcactcttcaaggagaagaaagagaagcctcggtcttaa

SEQ ID NO: 1052 - DNA, 728 bp, Solanum tuberosum
gctctcaccctccagctgctgcagcgagacaacttccttctgtcacaatggggaagacacgtggaatgggagctggtcgtaaacttaagtcccaccgtcggaggcagaggtgggctgacaagtcttacaagaaatctcatcttggtaatgaatggaaaaagccatttgcaggatcatctcacgccaaggggattgttcttgagaaaattggtattgaagctaagcagcctaactctgccattagaaagtgtgctcgagttcagttgataaagaacgggaagaagatagctgcttttgtacccaatgatggttgtttgaactacattgaagagaatgatgaggtgttgattgctggatttggtcgtaaaggacatgctgtgggagatattcctggtgttaggttcaaggttgtgaaggtgtctggtgtttcacttttggctctcttcaaagagaagaaagagaagcccagatcttaattatcactttctggtcaaatgcaagtgtgttctgaatgattttttgttaggatacaaaatacccttttcttttccctaattttcgactagtatagtttgtcaggcgtccatgaatatatccaggacatttgtttcaccttctgaaaatgaatgatgttgtgtggaattttggatcaagctgttggaagttgaaagcaattagttttccttcccaatataagagtacttttttgaaaaaaaaaaaaaaaaaaa

SEQ ID NO: 1053 - DNA, 918 bp, Vitis vinifera
gatctccaggattagggttttactcggcggctccttcttcctcctccaagctctcaaaccctagccgcagttgaacaacttctctccgtcgccatggggaagacgcgtggaatgggagctggtcgcaagttgaagtcccaccgtagaaggcaaaggtgggctgacaaggcatacaagaagtctaaccttggaaatgaatggaagaagccatttgctgggtcttctcatgcaaaaggcattgttcttgagaagattggtattgaggctaagcagccaaactctgctatcagaaagtgtgccagagttcaactaatcaagaatggcaagaagattgctgcatttgtcccaaacgatggttgcttgaactacatcgaggagaatgatgaggtgttgattgctggatttggacggaaggggcatgctgttggagatattcctggtgttaggttcaaagttgtgaaggtctctggtgtctctcttctggctctcttcaaagagaaaaaagagaagccaaggtcttagttttcttcaaggagttcaacctcacctacagtcttttgatacccttacctaagaattcggaatggttatttttattgttgagtggattttgtgaaccatctttgatctattttctagttaattgttatgaaacttggcagtgttacttgtgatcttagacaaacaattcttatttgtcatctttccttaatcccacttctatgtaccctgttgaaattactgaggacaggactggtagcatgggtaatgcttgctaaggagaaaaagccattgttccgcgcccaggactaaacaaggaagtttccatctataaactgcttattacagggccatttcctggtttaaactttcagttatattttcccatggaaattgccagcatgtggtttttagccg

SEQ ID NO: 1054 - DNA, 1283 bp, Zea mays
ttcttgcgtggatgctcccctcttggctatttgtttgtttcttgcagaggaattttttcctgaacttgtcctcgccgtcttgaaggtttcttgtttgggagcaggcggaggcgtttctttccttcttcgccggcggcggcatggactgggcagcggcgtccgggtctccgtcgtggggcgcggcggcgacggaccccggtccgaccatgctgtccttcgcaggcccgtcctcctccgccgccgacgccgaggtgcggctccaggatttcgccgcgggtcttgcccagagctcgcggccgactggggcggcgccgggagccgggaggaggtcccgcgcggccgtgggaggtgccggcgcggaggcgtgctccgtcgacggctgccgctctgatctcagccggtgccgcgagtaccaccggcggcataaggtctgtgaggcacactccaaggcgccggtggtggtcgtcggcggacaggagcggcgcttctgccagcaatgcagccggtttcacatgctgtccgagtttgacgaggaaaaaagaagttgccggaagcgtctggatggccataataggcgtcgaagaaagccacagcatgatctgacaaatctagggggtttctttccataccaccaagtgaatcagtttgagttctacccacaaacaattccaacagttggccagaattcggacgccgtgcacttggtgggccgtcagcagcctttctccatatcgttctcaagaacaccagacgagttccctttcccacagggtggcggtagcagtgtgctgcaccacctccatgcagcccgccctggccatcacgctgaaggcagcagccacactggaagcagcacacgcgacaacgctctctccggcacactgggccccgagtgtgctctctctcttctgtcatcgtcgctgcgtcgcccctcaactgctggcgtccccgccgttggccaaccccaggttactgcctcttcgaccactgccgtgtcgcaggctgcaacggcagctgtggccactgctgcattcgcggccagtgctggccaccatgtgtttgttcctgatgctatgtttgaggatccatcacaggcactgccattctcttggcagtaggattgttttgttgtcctgtttttatgtgctcctgttgtgttctcgatcgatactctagtgtctgatggctgggaattcggggtacctgtgcacttgcagactcaggttgtggtccgtcagagatgtatacaagtgacacgacgactagtgctggcatctgaaagg

SEQ ID NO: 1055 - DNA, 1413 bp, Zea mays
atatcttctcttgcggtggctttattgcacatcctgcggaccttcttgcgtggatgcttctctcttggctagttgtttgtttcttgcagaggaattttttcctgaacttgtccccgccgtcttgaaggtttcttgtttgggagcaggcggaggcgtttctttccttcttcgccggcggcggcatggactgggcagcggcttccgggtctccgtcgtggggcgcggcggcgacggaccccggtccgaccatgctgtccttcgcaggcccgtcctccgccgccgccgacgccgaggtgcggctccaggatttcgccgcgggtctcgcccagagctcgcggccgacgggggcggcgccgggagccgggaggaggtcccgcgcggccgggggaggtgccggcgcggaggcgtgctccgtcgacgtctgccgctctgatctcagccggtgccgcgagtaccaccggcggcataaggtctgtgaggcacactccaaggcgccggtggtggtcgtcggcggacaggagcggcgcttctgccagcaatgcagccggtttcacatgctgtccgagtttgacgaggaaaaaagaagttgccggaagcgtctggatggccataataggcgtcgaagaaagccacagcatgatctgacaaatctagggggtttctttccgtaccaccaagtgaatcagtttgagttctacccacaaacaattccaacagttggccagaattcggacgccgtgcacttggtgggccgtcagcagcctttctccatatcgttctcaagaacaccaccagacgagttccctttcccacagggacagggtggcggtagcagtgtgctccaccacctccatgcagcccgccctggccatcacgctgaaggcagcagcagccacactggaagcagcacacgcgacaacgctctctccgtctccggcacactgggccccgagtgtgctctctctcttctgtcatcgtcgctgcgtcgcccctccactgctggcgtccccgccgttggccaaccccaggttactgcctcttcgaccactgccgtgtcgcaggctgcaacggcagctgtggccactgctgcattcgcggccagtgctggccaccgtgtgtttgttcctgatgctatgtttgaggatccatcacaggcactgccattctcttggcagtaggattgttttgtcctgtttttatgtgctcctgttgtgttctcgatcgatactctagtgtctgatggctgggaattaggggtacctgtgcacttgcagactcaggttgtggtccgtcagagatgtacacaagtgacacgacgactagtgctggcatctgaaaggaagtggtagccgctgtgcagagtgtttagccgttaaatttaaatgcgtcccgtccaaaaaaaaaaaaaaaaaa

SEQ ID NO: 1056 - DNA, 1057 bp, Zea mays
cctttccttcctcgcgagaacgagaggctagaccgcatccagtggtggggctcggtatgggcggaagcgaatgcgccctgggcgacgccgctataggcgaggaaaccctaaattacgacggcgatgacgttgagatggccgacgccgactcggatacggaggaagcccgagcagctgaggtctccgctgcaactggaggatccgccggaggtgttaggcaggcggagaaggacggaccggatggaaagaagaagaggaagaagaggaggaacaaagggaagaagaacaaagggaggcaagatggggcgcccaccaacatcgcggacattaatcgatttgttcttaacacttgcaagcgcttgaaggagaagaagtcgtaccttgtctggaatgctgttggctgccttggtgtcactgctgtcaatgatcttgttagagaggtggaggctattcagaagtgtggtgggcagactattgctgatggaagccgctttcgcactggtggtggaattctctggaacatcttaaagtcgcgggaacccaaggcttacaaggaaataatggcaaagggaaaggaacttgagaagcagtttaggtgtacgaaacgaccacagattagcagaaacgaagatgcaagttcacagggcagtgctttaattgatgatgaaattgaagcgcgagaccaaaaggaaacattggatgaccctaagcaattggatgatgtggagatacacgtatcagacaataaagctcaacgcaaaccactggcggacagaattcgcgctcctgttgcatatgatgatctgtttgaagagggggagatacacgacggagaaccacgtagttagcatttcaaagattatgcctcgtcatgagtgcccaaaggatgtcacataattgcaagagcatgagtatgatttaagaactaccactgcaatgtagcagtttttcctctaaacatcatccccgtgaacttgcagcgatggagattttgttgcgttcggtgaaaccattgttgggcctgaattcagtggtcaatggaaatcatggttaaacg

SEQ ID NO: 1057 - DNA, 1121 bp, Zea mays
gaatttgagccggcttttaggctgctctgtcctctctcttttcgccccctcttgcgctgctttcctttccttcctcgcgagaacgagaggctagaccgcatccagtggtggggctcggtatgggcggaagcgaatgcgccctgggcgacgccgctataggcgaggaaaccctaaattacgacggcgatgacgttgagatggccgacgccgactcggatacggaggaagcccgagcagctgaggtctccgctgcaactggaggatccgccggaggtgttaggcaggcggagaaggacggaccggatggaaagaagaagaggaagaagaggaggaacaaagggaagaagaacaaagggaggcaagatggggcgcccaccaacatcgcggacattaatcgatytgttcttaacacttgcaagcgcttgaaggagaagaagtcgtaccttgtctggaatgctgttggctgccttggtgtcactgctgtcaatgatcttgttagagaggtggaggctattcagaagtgtggtgggcagactattgctgatggaagccgctttcgcactggtggtggaattctctggaacatcttaaagtcgcgggaacccaaggcttacaaggaaataatggcaaagggaaaggaacttgagaagcagtttaggtgtacgaaacgaccacagattagcagaaacgaagatgcaagttcacagggcagtgctttaattgatgatgaaattgaagcgcgagaccaaaaggaaacattggatgaccctaagcaattggatgatgtggagatacacgtatcggacaataaagctcaacgcaaaccactggcggacagaattcgcgctcctgttgcatatgatgatctgtttgaagagggggagatacacgacggagaaccacgtagttagcatttcaaagattatgcctcgtcatgagtgcccaaaggaatgtcacataattgcaagagcatgagtatgatttaagaactaccactgcaatgtagcagtttttcctctaaacatcatccccgtgaacatgcagcgatggagattttgttgcgttaaaaaaaaaaaaaaaaaaaaaaaaaaaaaaaaaaaaaaagaaaaaaaaaaaaaaaa

SEQ ID NO: 1058 - DNA, 1590 bp, Zea mays
cactgccgcctaccctcgttgaagcgcgctctctcgctctcgctctcctcgcgcttcctcccactcccactggacagagaggagggttagtggagggcggggtaggaagctaccgccgccacagtaacagcgttagctaggggggaagcacggaagcgggaagcaatggcgaccggcggcggcagcagcaggagcgacgacgtgcgcgggctcaagtttggcaagaagatctacttcgagcaggacggcgggagcgggagcggggcgggggcggtgggcggcaggaaggggaagggcgtggccaccggtggcgcgaggccggcgtccgccgcctccgcagcccagccgccgaggtgccaggtggacgggtgcggcgtggatctgagcgccgtcaagcagtactactgccggcacaaggtgtgcaacatgcactccaaggagccgcgcgtcttcgtcgccggcatcgagcagcgcttctgccaacagtgcagcaggttccaccagctacatgaatttgaccaagggaaacgtagctgccgccgccgcctcatcggtcacaacgagcgccggaggaagccaccacctggacctctcacttcacgatatggccggctcgctgcatcacttcaagagcctggcaggttcagaagcttcctgctcgacttctcgtacccaagggttccaagcagcgtgagggatgcgtggccaggaatccagcacggtggcgacaggatgctgggcaccgtccagtggcatgggcaccaagaacctcctcacccacaccgcagtgcagctgctggctatggcaaccatgctgcatacaactgccatggcggcttggtagcaggcggggccccaatgctctcctctgccgcctttgagctcccgcctggcggatgtgtcgcgggagttgccgccgactccagctgtgctctctctcttctgtcaactcagccatgggacacgacctcccacgaccaccggtccccagcaatgcccgcggccggcgccttcgacggcaccccggtggcgccgtccgtcatggcgagcagctacgcggcgtcgagcgcctggacgggctcgcgggaccccgctgccgacggcgccaggaacgcgcagcgtctcgacgatgctctgcacctggtccacccaggctccgcggcggtccacttctccggcgagctcgagctcgccctgcagggaagcggcgggccgccacacctgccgcgcgtcgaccatggcggctccggcggcggcaccttcaaccattccaccaccagcgcgatgaactggtccctgtagcagcactgcctgccttcatccggtcgccacgccacgagatgtggagggagcacttttgcattggacaccaccctggttttgtgcgccttaccttgccgttctcgttttttcagggtggagaaactgggattcctaaccatagtagatctaccgtgaattcccttcccgtgtagtagcgcattgcgtccatgaactcatttgatcgatcgtcgtgtcaccgtgtgcgtaactgcgtatctgtttggcgtaactgcgtatctgtttgttgaatctttccgaacattgcgg

SEQ ID NO: 1059 - DNA, 1511 bp, Zea mays
gcttcaccctccctgctcactgccgcctaccctcgttgaagcgcgctctctcgctctcgctctcctcgcgcttcctcccactcccactggacagagaggagggttagtggagggaacagcgttagctaggggggaagcacggaagcgggaagcaatggcgaccggcggcggcagcagcaggagcgacgacgtgcgcgggctcaagtttggcaagaagatctacttcgagcaggacggcgggagcgggagcggggcgggggcggtgggcggcaggaaggggaagggcgtggccaccggtggcgcgaggccggcgtccgccgcctccgcagcccagccgccgaggtgccaggttgacgggtgcggcgtggatctgagcgccgtcaagcagtactactgccggcacaaggtgtgcaacatgcactccaaggagccgcgcgtcttcgtcgccggcatcgagcagcgcttctgccaacagtgcagcaggttccaccagctacatgaatttgaccaagggaaacgtagctgccgccgccgcctcatcggtcacaacgagcgccggaggaagccaccacctggacctctcacttcacgatatggccggctcgytgcatcacttcaagagcctggcaggttcagaagcttcctgctcgacttctcgtacccaagggttccaagcagcgtgagggatgcgtggccaggaatccagcacggtggcgacaggatgctgggcaccgtccagtggcatgggcaccaagaacctcctcacccacaccgcagtgcagctgctggctatggcaaccatgctgcatacaactgccatggcggcttggtagcaggcggggccccaatgctctcctctgccgcctttgagctcccgcctggcggatgtgtcgcgggagttgccgccgactccagctgtgctctctctcttctgtcaactcagccatgggacacgacctcccacgaccaccggtccccagcaatgcccgcggccggcgccttcgacggcaccccggtggcgccgtccgtcatggcgagcagctacgcggcgtcgagcgcctggacgggctcgcgggaccccgctgccgacggcgccaggaacgcgcagcgtctcgacgatgctctgcacctggtccacccaggctccgcggcggtccacttctccggcgagctcgagctcgccctgcagggaagcggcgggccgccacacctgccgcgcgtcgaccatggcggctccggcggcggcaccttcaaccattccaccaccagcgcgatgaactggtccctgtagcagcactgcctgccttcatccggtcgccacgccacgagatgtggagggagcacttttgcattggacaccaccctggttttgtgcgccttaccttgccgttctcgttttttcagggtggagaaactgggattcctaaccatagtagatctaccgtgaattcccttcccgtgtagtagcgcattgcgtccatgaactcatttgaccaaaaaaaaaaaaaaaa

SEQ ID NO: 1060 - DNA, 1616 bp, Zea mays
ctgcctcctcctacccttccctcgctgaagccctctcgcgcctcctcccactcccactggacagagaggaggttagtggaaggcgggctaggaggctacgccgccacagacgcgaagcgatagcgtcggggggaagcaaggaagcgggtggcaatggcgaccggcggcggcggtgggagcgacgacttccacgggctcacgttcggccagaagatctacttcgagcaggacgcgggcgccgccggggggagcgcgacgggcggcaggaaggggaagggcgccgcggcgtccgcgagcgccgcccagccgccgcggtgccgggtggacgggtgcggcgtggatctgagcgccgtcaagcagtactactgccggcacaaggtgtgctacatgcactccaaggagccgcgcgtcttcgtcgccggcatcgagcagcgcttctgccagcagtgcagcaggttccaccagttacctgaatttgaccaagggaaacgaagctgccgccgccgcctcattggtcacaacgagcgccggaggaagccaccacctggaccactcacctcacgatacggcccgcttgctgcatcactagttcaagagcctggtaggttcaggagcttcctgctcgacttctcgtacccgagggttccaagcagcgtgagagatgatgcgtggcaatggcaagggatgcagcatggcggcgacaggatgctgctgggtaccgccagcgccatccagtggcatgggaaccaagaacctcacccaccacatcgcagcgcagctgcgggctatggcaaccatgcgtacaacaactgccatggtggcggcggcttggtagcagcagcagcgggggcgtcaatgctctcctctgccttcgagcccccgcctggcggtggcggatgtgtcgcaggagctaccgcggccgactccagctgtgctctctctcttctgtcaactcagccatgggatacgcccacccaaagtggcagcagccaccacaaccggtccccagcgatgtccgcggctgcaggcgccttcgaagtggcgccgtcgtccgtcgtggcgagcagctacacggcgtcgagctcctggtctggctcacgggaccctgccgacggcgccaggaaaaacgcgcagcgtcacgatgatggcctgcacctggtccatccaccaggccccgtccaccacggccacttctccggcgagctcgagctcgccctgcagggaagcggcccgccgcatgtcgaccatggcggcggcacctgcttcagccattctgacaccaacgcgatgaattggtccctgtagggacaacaacttttgccgccactgccttgatccggtcggcacgccacgagacatggagcacttgggattgggacaccctggttttgtgcccctgaccttgccgttctggtttttcagggtggaactaactgggattccctaggcgtagatcatgaatcccctttccccgtgtaacccattgcgtccatgaagtcggcccaacaccggatcatatataattctacaactcccataacctaaatcattcttcagttgtgaagatatatgcttgtcaagtgacctggttttattttatctgccatcaattcatc

SEQ ID NO: 1061 - DNA, 1827 bp, Zea mays
gaggatagggaaggcatgcatgatagggacttcaaagacccaggtgagagctcagtcgacggtaatgccgccgcagctcctttagtcgccaggcgattggcatgccacggttcctggttcatctcgcagagttagtttgagttcgaggcttgtgtggtgttgctgattgcgcacaagaggtccaggaacatataggcggcggatctggctgcgttctttctgtttcgtcagagaaggggtttcagcgctgccagctttcacataaacaagttggggaagcagttgaggttttctaattcttcttggaaggattgagatctccagttctgataatgggttcttttgggatgaactggaatcagaaggaccccatggtgtgggattgggaacatctagtaccgtctgtctcaaatgcagttacaaggcacggatctgctaattcatctggtggtactcttacttctaactcagagctagggcatggttcatccaagagctctatttcagcgtccattgattcaccctctggagtagggaacagcttagagttcaacttcgccgctgttgagaggcatgttaagaacacgggcacgaacggcagagtcgatgactcggggaattctccatcgtcaatgatagctttcaaccaaggagagccattaatcagcctgaaacttgggaagagggcttacttcgaaaacgcctgcggaggacaggatgccaaggtttctgcagcttcagacgttacttctgcagccagcgtggtcaagaagactaaggtgtctcagcagaatgcaaagaactggtactgtcaggttgaagggtgcaaagttgacctgtcttctgctaaagattacaatcgcaagcacaaggtctgtgtagtccattctaaagctaccaaggtggttgttgctggtctagagcgtcggttttgtcaacagtgtagccgttttcatggtttagcggagtttgatcagaacaaacgaagctgtcgtaggcgtctgatgcatcataatgcacggaggaggaaacctcaggcagacacaatttcattcaattcatcgacaatgttttatgatacaaggcagcggacaaatcttttctttagtcaaccactttatggccaagtgaggagcaatgcagggtcttcatgggataacttgggaggcttaaaattcatggagacgaaacatccgccagtgcatccaacaaaaacagcatcccctgatgaactgcatttctcagccctccagataactagtgctgcggctcacaccggacatcatcatgatctcgatgggttcatggcgttcaagggaaccagcacaaaggtccttaaccaaggcgtggaggcttgggcggccgcttccagctcgaacaacggaggcccagaaggtgggcgtgctctctctcttctgtcagacggctcgtggggctcgagttcagccgtcatccagcagcccacatctcacgcggacgccggtgcattgctgccgcccctcgccaccgttgccgtctccaacgccgccgccgccgccgggcatcctctggacccgtccccgggaaggttctggccgcaagacgatcatcccccgctcgtcgacggacccgccacgcagattccggagctggcgcacctccggatatggtgaaaggaaacgcatgtgatgcggtgactggtgacatgccagttcgagggcctggctgggaacacatctggttggttagcctgccgctctggcttgaatttgccggcgacgacagtctttgtttgtatcttttgatcagaacggacacagacatgtttgcgcaaaaaaaaaaaaaaaa

SEQ ID NO: 1062 - DNA, 1616 bp, Zea mays; identical to SEQ ID NO: 1060

SEQ ID NO: 1063 - DNA, 1590 bp, Zea mays; identical to SEQ ID NO: 1058

SEQ ID NO: 1064 - DNA, 1511 bp, Zea mays; identical to SEQ ID NO: 1059

SEQ ID NO: 1065 - DNA, 1304 bp, Zea mays
gcccctcgacggcgcccgcgcccgcccgctgccaggtcgacggctgcaacgttgacctcaccgacgtcaagcccgcctactactgccgccacaaggtgtgcaaaatgcactccaaggagccccgcgtcctcgtcaacggcctcgagcagcgcttctgccagcagtgcagcaggttccaccagctgcctgaattcgaccagctaaagaagagctgccgcaaacgcctcgcaggccacaacgagcgccggaggaggccgccgcctggaccccttgcgtcacgatacggccgtcacgctgcgtcgctcggcgagcccggcaggctcagaagcttcatgctggatttctcgtacccgagggtctcaagcgccatgaggggtgggtttccggcggtgaggcccggtggtgaaagggtgcctggcggtatccagtggcaagcgggcttggatcctcgtcaccaccaaggcgcggtcgcgggatacggcgcccactatgggagcgagggtggtagctcgtcgtcggcgaggccgccggtgttccctggcccggagctgcccccaggtggatgccttgcaggagtccccgcggactccagctgtgctctctctcttctgtcaactcagccatgggatgctgcccacagccacagccacagccacgctgcgccaacagcgggtttcgacggcggcagccctgtggcgccctccctcatggcggcgagtagctacatcgcgccgagcccctggaccgagaccgactcctggggccacgaaggcgggcggagcgtgcctcagctgccacctgacgacgtccccctcggcgaggtgcactccggctcgagcagccaccacggccagttctcaggtgagctcgagctcgccctgcagggaaacaggccagcgccagggtcggcggcaccgccagcgccgcgcaataatcagggctccgcgggcacgttcgaccaggctggcaacacgatggactggtcgctctaggccgggggccgaaataaagcgcagcagatcctagccgcgcagggagatggaggaggctgaaagtctgatgctgcacgctgcttgcttagcttagagcatccagcatgataagagtgatgaactgatgcggtgtcaggagactagtttattctgtgcttcaccatgaactcgtctgtcgcggcgtctatgtagacagacgtcacggcagacgtccgtggtttgaagttaccagtatgcttgtcgtggactttgctcgcgatgcattaatctcattgttcaccatccagaaaaaaaaaaaaaaaaaaaaaaaaa

SEQ ID NO: 1066 - DNA, 1711 bp, Zea mays
ggcaacagcgagccctgctgtccctctgcttcgccacctcctccctccctctctttccttcctcttggaggagagagaagagggggagagccagtcagccagccagcccaagaacagcgtacgtacgttgtcaagtcccgtcgccgccgcagcagcttcgctcctcccgccccgcccaccgtcgcgcgcggcggcggggagcgagcaatggaggccggcggcgccagcggcggcgacgacggggacggccagctgcacggcctcaagttcggcaagaagatctacttcgaggacgccggcggctccagtagcagcggcggcagtggcagtgccagcgcgaccgcgcctccagcgacgcagcagccgtcgccgccggccgcttcgcctagggccgcgcccggtggcggcaggaggggcagggccgcggctggcggcgcgggcccctccttgccgcccgcgcccccgcgctgcctggtcgacggctgcaacgccgacctcaccgacgccaagacctactactgccgccacaaggtgtgcgaaatgcactccaaggagccccgcgtcgtcgtcaacggtctcgagctacgcttctgccagcagtgcagcaggttccacaacctggccgaatttgaccagcaaaagaaaagctgtcgcaagcgtctagcaggccacaacgaacgccggagacggccacctcctggaccccttgcgtcacgatatggccgtctcgctgcaccgctcggtgaagagcccggcggcagattcagaagcttcatgctggatttctcatacccaagggttccaagcgccatgagggatgggtttccagcggttcgacctggtggtgaaagggtgcctggcagcaatatccagtggcaagcagcgagcctagatcctcctccccctcaccatcagagcgcggcagcaggatacggtgcccactcgtacgggagcccgggtagctcgtcgtcgtcgaggccaccggtgttccctgctggcccggagctccccccaggcggtggatgtctcgcaggagtccccacggactctagctgtgctctctctcttctgtcaactcagccatgggacgctgctggccacagcgccggccacggccacggccacgccgcgtcactgcccgcaacagcaggcttcgacggcaaccccgtggccatggcgagtagctacatcgcgccgccaagcccctggaccgactcccgggcccacgaaggcgggcggcggaacgtgcctcaactgccacccgacgtccccctcggcgacgtgcactctggcccaggcacccatcacggccagttctcaggtgagctcgagcttgccctgcagggaaacaggccagccccggcgccgcgcaatggccagggctccgcgggcgcgttcgaccaggccggcagcacgacggagtggtcgctctaggaggccaaataaaagcgcggcacatcgtcgtagccgcacagcgagatggagcttgaagcctggctccgctagctacctgcatgcgctgtttgcttgcctagaggctagagcatccagtatgataataagcgaggaactagtgcagtgccggccaggagactgatttcttttgcgcttgtccatgaactcgtctgttgcgtctatgtacacctccatggtttgaactcgtcggggacttcgctcgatgtgttattaatctcatgctcatccttccgct

SEQ ID NO: 1067 - DNA, 1132 bp, Zea mays
gccccactaactattgactgtcggattccctacccgtcggcgacaatccgctgcccccaatctgcctggtaggtctcgcacctccggtcatggctgccgaagctggcccaatctccaaggtcctcatcgtcatagcaatgcagaaggaggcgacgccgctcgtccacaagttcaatctcgtcgaggcgcccgcccaccaatccacttttcctaaaggtgccccatgggtttggtaccatggcagctacaaaggcctccacattgaccttgtattgcctggaatggatgctgttcttggagtcgacagtgttggtacagtaccagtagctgttgtgactagtttctccattcaaacattgaagccagaccttatcattaatgcgggcactgctggtggcttcaaggccaaaggagcaagcattactgatgtattccttgcatcagatgttgcattccatgacaggaggataccaatacctatttttgacatgtatggaactggagcacgcaaaacttttgcagctcctaatatcttgaaggagctcaatttgaaggttggcaagttgtcgactggggattctctggatatgtgtccccaggataaggagttgatactgcgcaatgatgctacaataaaggacatggagggagctgctgtagcatatgtcgctgacatgttctcgacaccagcgatctttgtgaaagctgtgactgatatcgtggatggggtgaagccaacgtatgaggagtttctgcagaacctgattgccgtgacgacggcactggagctggcagtcaccaaagtggtggatttcatcagcgggaaacgcatctccgatctttgaaagctcgtggtcacgaaatccaacatccccctgctctgatgcacgatgctaggctaggatacaatacaacgttgggtcaatgattttttttggaggtgttctatacgtgaggttttaccccttttgcaatggctcttgatctattcctgaataccgaccagagcagttgtctcttgctaaacagaaggaatgtaaagtgagcaaacatgccattgatcgttgcgaccaaactaacaatgtctgtgcgctgctaaggcacgcatcggcgactattctagagacgattc

SEQ ID NO: 1068 - DNA, 1211 bp, Zea mays
gtgagccggcaccaatcatgccgcttgcattgctggtaccgacccgtccccaccagtccagtctataagagcgacgggatcacggaaacctgttcaccgctgcgccgcctcactattgactgtcggattccccactcgccggcgacaaccgccgcgcccgatccgtctgctaggtcttgcacctccgggctctggccatggctgccgaagctggcccaatctccaaggtcctcatcgtcgtagcgatgcagacggaggcgatgccgctcgtccacaagttcaagctcgtcgaggcgcccgcccacgaatccacatttcctaaaggtgccccatgggttaggtaccatggcaactacaaaggcctccacattgaccttgtattgcctggaaaggatgctgttttaggagtcgacagtgttggtacggtatcggcagctcttttgactagtttttccattcaaacattgaagccagaccttatcattaatgctggcactgctggtggcttcaaggccaaaggggcaagcattggagatgtattcctggcatcagatgtttcattccatgacaggaggataccaatacctgtttttgacatgtatggaattggagcacggaaaacttctgcagttcctaatatcttgaaggaactcaatttgaagattggcaaattgtcgactggggattctctggatatgtctccccaggatgagaaggtgatactgagcaatgatgctacagtaaaggatatggagggagctgctgtggcatatgtcgccgacatgttttcaacgccagcgatctttgtgaaagccgtgactgatatcgtggatggggagaagccaacatctgaggagtttctgcagaacctgattgccgtgacggcggcactggacctggcagtcaccaaagtggtggatttcatcagcgggaaacgcatctctgatctttgaaggctgtcatgaaatccgacacccccactgctctgatgcacgatgctaggctacgaacaatacaacattgggtcaacgattttttgtgaggtgttttctatgtgaggttaaaccttcttaaccctgtgtacaaaattcctgccaattgctatgggccggccatagcgtggaattttgtagaataatttgcaaaatgtattttgtggtgcaaatatcgatatataataatatgctgggggacgggatccccgtgggatt

SEQ ID NO: 1069 - DNA, 1204 bp, Zea mays
attgctggtaccgacccgtccccaccagtccagtctataagagcgacgggatcacggaaacctgttcaccgctgcgccgcctcactattgactgtcggattccccactcgccggcgacaaccgccgcgcccgatccgtctgctaggtcttgcacctccgggctctggccatggctgccgaagctggcccaatctccaaggtcctcatcgtcgtagcgatgcagacggaggcgatgccgctcgtccacaagttcaagctcgtcgaggcgcccgcccacgaatccacatttcctaaaggtgccccatgggttaggtaccatggcaactacaaaggcctccacattgaccttgtattgcctggaaaggatgctgttttaggagtcgacagtgttggtacggtatcggcagctcttttgactagtttttccattcaaacattgaagccagaccttatcattaatgctggcactgctggtggcttcaaggccaaaggggcaagcattggagatgtattcctggcatcagatgtttcattccatgacaggaggataccaatacctgtttttgacatgtatggaattggagcacggaaaacttctgcagttcctaatatcttgaaggaactcaatttgaagattggcaaattgtcgactggggattctctggatatgtctccccaggatgagaaggtgatactgagcaatgatgctacagtaaaggatatggagggagctgctgtggcatatgtcgccgacatgttttcaacgccagcgatctttgtgaaagctgtgactgatatcgtggatggggataagccaacatctgaggagtttctgcagaacctgattgccgtgacggcggcactggacctggcagtcaccaaagtggtggatttcatcagcgggaaacgcatctctgatctttgaaggctgtcatgaaatacgacacccccactgctctgatgcacgatgctaggctacgaacaatacaacattgggtcaacgattttttgtgaggtgttttctatgtgaggttaaaccttcttaaccctgtgtacaaaattcctgccaattgctatgggccggccatagcgtggaattttatacgaataatttgcaaaatgtattttgtggtgcaaatatcgatatataataatatgctgggggacgggatccccgtgggattagatgaaaaaaaaaaaaaaa

SEQ ID NO: 1070 - DNA, 998 bp, Zea mays
cgccccactaactattgactgtcggattccctacccgtcggcgacaatccgctgcccccaatctgcctggtaggtctcgcacctccggtcatggctgccgaagctggcccaatctccaaggtcctcatcgtcatagcaatgcagaaggaggcgacgccgctcgtccacaagttcaatctcgtcgaggcgcccgcccaccaatccacttttcctaaaggtgccccatgggtttggtaccatggcagctacaaaggcctccacattgaccttgtattgcctggaatggatgctgttcttggagtcgacagtgttggtacagtaccagtagctgttgtgactagtttctccattcaaacattgaagccagaccttatcattaatgcgggcactgctggtggcttcaaggccaaaggagcaagcattactgatgtattccttgcatcagatgttgcattccatgacaggaggataccaatacctgttggcaagttgtcgactggggattctctggatatgtgtccccaggataaggagttgatactgcgcaatgatgctacaataaaggacatggagggagctgctgtagcatatgtcgctgacatgttctcgacaccagcgatctttgtgaaagctgtgactgatatcgtggatggggtgaagccaacgtatgaggagtttctgcagaacctgattgccgtgacgacggcactggagctggcagtcaccaaagtggtggatttcatcagcgggaaacgcatctccgatctttgaaagctcgtggtcacgaaatccaacatccccctgctctgatgcacgatgctaggctaggatacaatacaacgttgggtcaatgattttttttggaggtgttctatacgtgaggttttaccccttttgcaatggctcttgatctattcctgaataccgaccagagcagttgtctcttgctaaacagaaggaatgtaaagtgagcaaacatgccattgatcgttgcgacc

SEQ ID NO: 1071 - DNA, 1211 bp, Oryza sativa Japonica Group
accacgcggcggcggcagcagcagcagctagggtttagagagcagcccccaatcccatggccccgccctccgactccgacgactcggccccgatccccgccggcgccatctccaagctcctcatcgtcatagcgatgcagacggaggcgctcccgctcgtcaacaagttccacctcgtcgaggcggaggaatccatatttcctaaaggtgccccatggattagataccatggcaactacaaaggccttcacgttgaccttgtatggcctggaaaagatcctgttctcggagttgactgtgttggcacggtatcagcagcacttgtgacttatgcttctattcagtcattgaagccagatctgatcatcaatgctggcactgctggtgggtttaaggccaaaggagcagacattggagatgtctacttagcatccgatgttgcattccacgataggagaatacctatccctgtcttcgacatgtatggaattggaacacgaaaaacatttgctacccctaatatattgaaggaactcaatttgaaggttgggaagctctcaactggcgattctctagatatgtctccccatgacgagtcagcaatattgaacaatgatgctacagtcaaggatatggagggagccgcggtggcatatgttgctgacatgttttcaacaccggcaatctttgtgaaagctgtgactgatattgttgatggggagaaaccaacagccgaggagtttctgcagaacctggttgctgtgacagcagctctggacaaggcagttacagaagtggttgatttcatcagtgggaaatgcatatcggatctttgaatgatgaagcttagaaacctgttcatcaaatccaagctctgctgcttcaatgcactatactatactacatcactgctgtatgatttttcatggggatgcgtatacaatttttaggttcccctgaggccctgatcccccgtatgtacaaaattcttggcaattacttggatcaatagcgtggaattttgtagaatattctgcaaaatgtgcagtgtaatgaaactaaataaggtgatattctgtcaaactaagataagtggtgggcggtggagttattttcttaatagagcattgagaccatcttcattgtttgctctacgattggtaaactgtgaaaaaaaaaacccgaagaagcaataaacatagtttacgtgt

SEQ ID NO: 1072 - DNA, 1227 bp, Oryza sativa
accacgcggcggcggcagcagcagcagctagggtttagagagcagcccccaatcccatggcgccgccctccgactccgacgactcggccccgatccccgccggcgccatctccaagctcctcatcgtcatagcgatgcagacggaggcgctcccgctcgtcaacgagttccacctcgtcgaggcggaggaatccatatttcctaaaggtgccccatggattagataccatggcaactacaaaggccttcacgttgaccttgtatggcctggaaaagatcctgttctcggagttgactgtgttggcacggtatcagcagcacttgtgacttatgcttctattcagtcattgaagccagatctgatcatcaatgctggcactgctggtgggtttaaggccaaaggagcagacattggagatgtctacttagcatccgatgttgcattccacgataggagaatacctatccctgtcttcgacatgtatggaattggaacacgaaaaacatttgctacccctaatatattgaaggaactcaatttgaaggttgggaagctctcaactggcgattctctagatatgtctccccatgacgagtcagcaatattgaacaatgatgctacagtcaaggatatggagggagccgcggtggcatatgttgctgacatgttttcaacaccggcaatctttgtgaaagctgtgactgatattgttgatggggagaaaccaacagccgaggagtttctgcagaacctggttgctgtgacagcagctctggacaaggcagttacagaagtggttgatttcatcagtgggaaatgcatatcggatctttgaatgatgaagcttagaaacctgttcatcaaatccaagctctgctgcttcaatgcactatactatactacatcactgctgtatgatttttcatggggatgcgtatacaatttttaggttcccctgaggccctgatcccccgtatgtacaaaattcttggcaattacttggatcaatagcgtggaattttgtagaatattctgcaaaatgtgcagtgtaatgaaactaaataaggtgatattctgtcaaactaagataagtggtgggcggtggagttattttcttaatagagcattgagaccatcttcattgtttgctctacgattggtaaactgtgaaaaaaaaaacccgaagaagcaataaacatagtttacgtgtaaaaaaaaaaaaaaaa

SEQ ID NO: 1073 - DNA, 877 bp, Oryza sativa Indica Group
cgccctccgactccgacgactcggccccgatccccgccggcgccatctccaagctcctcatcgtcatagcgatgcagacggaggcgctcccgctcgtcaacaagttccacctcgtcgaggcggaggaatccatatttcctacaggtgccccatggattagataccatggcaactacaaaggccttcacgttgaccttgtatggcctggaaaagatcctgttctcggagttgactgtgttggcacggtatcagcagcacttgtgacttatgcttctattcagtcattgaagccagatctgatcatcaatgctggcactgctggtgggtttaaggccaaaggagcagacattggagatgtctacttagcatccgatgttgcattccacgataggagaatacctatccctgtcttcgacatgtatggaattggaacacgaaaaacatttgctacccctaatatattgaaggaactcaatttgaaggttgggaagctctcaactggcgattctctagatatgtctccccatgacgagtcagcaatattgaacaatgatgctacagtcaaggatatggagggagccgcggtggcatatgttgctgacatgttttcaacaccggcaatctttgtgaaagctgtgactgatattgttgatggggagaaaccaacagccgaggagtttctgcagaacctggttgctgtgacagcagctctggacaaggcagttacagaagtggttgatttcatcagtgggaaatgcatatcggatctttgaatgatgaagcttagaaacctgttcatcaaatccaagctctgctgcttcaatgcactatactatactacatcactgctgtatgatttttcatggggatgcgtata

SEQ ID NO: 1074 - DNA, 1196 bp, Hordeum vulgare subsp. vulgare
gataaggaagcgaaccgcgggtttggcacctcctcgcccgccgccgccgccgtcgccgtcgccgtcgccgaccagatcccgcgccgccgcagccccgctcctccggccatggcgccaccctcctccgaagagccggccgccgcctccgccgaggcctccgcagccggcgccatctccaaggtcctcgtcgtcatagcgatgcagacggaggcgctcccgctcgtcacccggttccagctcgtcgaggcggccgccgacgagtccatatttcctaaaggtgccccatggactcggtaccatggcgaatacaaaggcctccacattgaccttgtatggcctggaaaagatcctctgctcggagtggacagtgtgggtacagtatcggcagctctggttacttatgcttctatacagttgttgaagccagaccttatcatcaacgctggtactgctggcggtttcaaggccaaaggagcaggtattggggatgtcttcttggcttcagatgttgcattccatgacaggagaatacccattcctgtttttgacagttatggaattggagcgagaaaaacatttgaaaccccaaatatagtgaaagaactcaatttgaaggttgggaagctgtcaactggtgattctctagatatgtctcctcatgatgagtcagcaatactgagcaatgaagctacagtcaaggatatggagggagcagcggtggcttatgttgctgacttgttctcaacacccgctatctttgtcaaagctgtgaccgacattgttgatggggagaagccaacagccgaggagtttctgcaaaacctgatctcggtgacgatggcgcttgaccaggcagtcttgcaggtggtagacttcatcagtggcaaatgtatctctgatctctgaacgcccaaccttccgctatgctgttctgggttccacaaatcgagggagcctgaatatatattgttggatgtataatgtttccctggggattccacccaggttttacattcccgtgacccccttgtaaaaaattcttggcgattactccgagccattttatgggattttgtacaattttacaaactatgcagcttagtgaggctcggctcaataaggtggtgtattgttgtactggaataaatgatgggcactggaactcccatggattcagcacaatggttgatggatgc

SEQ ID NO: 1075 - DNA, 4086 bp, Zea mays subsp. mays
ggattgggatctcaacgcggcgggcgcgtgggacctcgcggagctggagcgggaccacgcggccgcggcgccgtcgtcggggggccacgccgccaatgctgccgcggcgggcacggggacggagagccgcccgccggcgcccggggcagcaggggcacccgccgagtgctccgtggacctgaagctgggcgggatgggcgagtgcgagcccggcgcggcccgcagggagagggaggccgcggcgggggcggcgaagcggccgcgccccgccgggcccggcgggcagcagcagcagcagcagtgcccgtcgtgcgcggtggacgggtgcagggcggacctgggcaagtgccgcgactaccaccggcggcacaaggtgtgcgaggcgcactccaagacccccgtcgtcgtcgtcgccggccgcgagatgcgcttctgccagcagtgcagcaggtagtatccccgccttcttttcccatggggggctggtgtagtgtagtgtagctcgtccctgtctcgtttcaaggatgcacaactttaccttttccggcttgcctttttttttttcgttatcttttttctctctctctttttcctgaaaaccaaagagatgaaaaaccttcatctcgttcgttcgtttcctcctgtagctacggtacctgaattattggcacgcctttttcctttctcccggcctcctcctgcgctcgctgctgctgctgcacactgctctcaggcaggcctagcgttcgtttccttcactttctctgacgccctgatgcgaattaacatctgctgctccccaatcgtctgctcaagattcagcccgctgccacggacacgtgagctcctgcgcttgcttttccgagcggtttcttgctttcacgccctttggcggcgacgggacgggatgcccccccccccccccccccggtactctgccattggctcctcctctagtcggcgctgcttgcttcccggcgacagttcgccaccgccgcagatgaagcgccgccacggtttggcgtgccgcgttgagcgagacaggggtgtactcccagctttggctaccatcaatcatttgatgtttaggtgccgcgttgtgagctgtactgctacagtatctctgcagaatgtattctgtagtagtatgaaaaggtaaaggcggcgtactgctatagtatctctgcagaatgttcggaggagtacaccaactgaaagaggtttaggaaaattgcatcgtggatctagaattctagatgcagtagtgtagcctacagtagccctgtacacacataaaggcatttttcttataaaattgtctcgcaaaatgggatttttttgtgctaattatagggtgctttagcgccacctgggccgtataggatgctttagcgcaacatttctgaacaaccctatgcagcttccatagaccaccacaggcattcccgcatgcagtttgctctaaatgcctccttttcatttttactatccctgaacgacgacccatccatttctttttccgtctcagggaagtagccattaaatgctagcagtctttttttaaagtatcgcttggtttgagatgttattaggcccggtttggttggaaaaaccgctccattttaatctcctttagtttgtaaattacagtactaaactgttttagtctttagtatctcgaggagtgactaaaagagactaaaccatataaatttcaccttttatctcccatttatttcagttacactaatgacgggagaatgctaaagtgtattttagtcatcttataattgatttagtgtgttttaaatacttccttagtctataaaattaaacaggatataggctaaactttagttggactaaaccatataaatttcgtctggtgaagtttacggcagtacagcgctgtgttggcgcccagttttgtcttgctcatatggacagcagagacaggtcccgctctcctgtggtggacctaaacctaaacagcgtaggttcagatcgttcctggagcgatcgacgctgtggcaagcgatcctaatgcgatgctctggtgacatgtcctgtttctgtttacgccggaacatcttgctcggtggggacaattctcaatcattgatcactttgtcttctgctttaaattgcagactttgtaggttaatagtaagttgtcagccagtgagccaacagattctcagctttctgtttaccgtctgtgtggtccaggcttgacaggtcttatagtattttcctgtctctaataagcatggacaaggaacattggtccctggtgtgatgtgtattaactataacaagcatgtatgtgcgccacagtacattaactattctgacaataattacgttgctgtttcttcagtgaggaccatcttagcataccgttggatcatgtgcccaccctactacctaggaccatctattcttctaaaaaaaactgagtatcttatacttgtttagaattatcctaattcaaagaatcctgtggtcctaatcgattatgccatcattcattggtcagcatattacactgcaactttctcgtttgcccgtactcgaattcagttgtctgatcaagagttttttttttgttttttgtttatgtaggttccatctacttgcggagttcgacgccgacaagcgcagctgcagaaagcgtctggacgggcacaatcgccgccgcaggaagccacagccagacaccatggcttctgctagctttatcgcaagccagcaaggtcattttcgtactcaccaattttgctttggttttttttctccccaagtctgtacttggttcgaatacatctacattgtttccatcttgctggtgctggacaaagaaaaggtaaaacgtcagaacagatctgtgcacacataaaccatgagaagtaaaagactgctctgttaaacttgtagagcttgcgtagcatttcagcatgtttcagaactagaattcggttcataagataagatgctactctagcatccctgcatacattagttgcgacaagacgaagattacattgttgacgcatcaagttattatgaacctcttctgtttctgtcaattgtgtcctcatatttagtgcaaggtcttgctaatgcctttaagttaaaaaagattagtatactgtatgtttctttgcctttcagatgtgttctagtacaaactacttgtatgcttcaccacttgtagattggcatgtatatgagtctcaaacttccaacacaattgccagcagattggcatatagaactgcaataaaaattctgattcacattgtatgaaacggcgcacagaatcaatttatcagttatgtcacctgatcgacatttcttcccaattgatcaggcacgcgattctcaccatttgcgcatccaagactggaggcgagctggccgccgggggtgatgaaaaccgaggagagtccatatcacatcactcaccaaatccctctgggctccagcagcagcagcaggcagcagcatttcgtggctctgggagccgccacgcctgcctacgccaaggaaggccggcgcttccctttcctgcaggagggcgagataagcttcgccaccggcgtggtgctggagccgccggcggcggctccagcgtgccagccgctcctcaggacgggagcaccatccgagagcagcggcgccggcggcagtaagatgttctccgatcaggggctggctcgcgtgctcgactcggactgtgctctctctcttctgtcagcgccggccaactcctccggcatcgacgtcagcaggatggtccgcccgactgaacacgtccccatggcccagcagcccgtggtcccgggcctgcagttcggcagcgcgtcgtggttcccgcgcccccaggcttccacgggcggctccttcgtcccctcctgccccgccgcggtggagggcgagcagcagctgaacgccgtgctgggccccaacgacagcgaggtgagcatgaactacggcgggatgttccacgtcggcggcggcagcggcggcggcgagggctcctcggacggcggcacctcgtcgtcgatgcccttctcgtggcag

SEQ ID NO: 1076 - DNA, 1469 bp, Zea mays subsp. mays
ctaggactagcggttgcaacgtcggcgcgcgcggcgtacgtcgggcatggattgggatctcaacgcggcgggcgcgtgggacctcgcggagctggagcaggaccacgcggccgcggcgccgtcgtcggggggccacgccgccaatgctgccgcggcgggcacggggacggagagccgcccgccggcgcccggggcagcaggggcacccgccgagtgctccgtggacctgaagctgggcgggatgggcgagtgcgagcccggcgcggcccgcagggagagggaggccgcggcgggggcggcgaagcggccgcgccccgccgggcccggcgggcagcagcagcagcagtgcccgtcgtgcgcggtggacgggtgcagggcggacctgggcaagtgccgcgactaccaccggcggcacaaggtgtgcgaggcgcactccaagacccccgtcgtcgtcgtcgccggccgcgagatgcgcttctgccagcagtgcagcaggttccatctacttgcagagttcgacgccgacaagcgcagctgcagaaagcgtctggacgggcacaatcgccgccgcaggaagccacagccagacaccatggcttctgctagctttatcgcaagccagcaaggcacgcgattctcaccatttgcgcatccaagactggaggcgagctggccgccgggggtgatgaaaaccgaggagagtccatatcacatcactcaccaaatccctctgggctccagcagcagcagcaggcagcagcatttcgtggctctgggagccgccacgcctgcctacgccaaggaaggccggcgcttccctttcctgcaggagggcgagataagcttcgccaccggcgtggtgctggagccgccggcggcggctccagcgtgccagccgctcctcaggacgggagcaccatccgagagcagcggcgccggcggcagtaagatgttctccgatcaggggctggctcgcgtgctcgactcggactgtgctctctctcttctgtcagcgccggccaactcctccggcatcgacgtcagcaggatggtccgcccgactgaacacgtccccatggcccagcagcccgtggtcccgggcctgcagttcggcagcgcgtcgtggttcccgcgcccccaggcttccacgggcggctccttcgtccccttctgccccgccgcggtggagggcgagcagcagctgaacgccgtgctgggccccaacgacagcgaggtgagcatgaactacggcgggatgttccacgtcggcggcggcagcggcggcggcgagggctcctcggacggcggcacctcgtcgtcgatgcccttctcgtggcagtagtcgtcgtcacttgtcagcagccgctgcgttctctcatctttcgcgcttcagacgatctggtagggagatactggctttagtgatcactgatcagcattgatttctgttctttttcctgcattccctt

SEQ ID NO: 1077 - DNA, 1314 bp, Zea mays
gtatcctctcctcagttgcttcgacgtatttctctctctatctatacggttccgaagaaggtagagagagaaactcgaaggggagaggacagaagagggagatacaggttaatttttaggtaccagatcatctgatttctcagaagcaaaatgttgtttggagctcattaacaccatcctgtaatgcctgtgattttacgggaaatggaggatcattctgtccatcccatgtctaagtctaaccatggctccttgtcaggaaatggttacgagatgaaacattcaggccataaagtttgcgataggcattcatcatcggagtctgatcggtctcaccaagaagcatcagcagcaagtgaaagcagtccaaatgaacacacatcaactcaatcagacaatgatgaagatcatgggaaagataatcaggacacaatgaagccagtattgtccttggggaaggaaggctctgcctttttggccccaaaattacattacagcccatcttttgcttgtattccttatactgttgatgcttattatagtggggttggggtcttgacaggatatgctccacatgccattgtccatccccagcaaaatgatacaacgaacactccgggtatgttacctgtggaacctgcagaagaaccaatatatgttaatgcaaaacaataccatgcaatccttaggaggaggcaaacacgtgctaaattggaggcccagaacaagatggtgaaaaatcggaagccatatcttcatgagtcccgacatcgtcatgccatgaaacgggctcgtggatcaggaggacggttcctcaacacaaagcagctccaggagcagaaccagcagtatcaggcatcgagtggttcattgtgctcaaagatcattggcaacagcataatctcccaaagtggccccacctgcacgccctcttctggcactgcaggtgcttcaacagcctgccaggaccgcagctgcttgccctcagttggcttccgccccacaacgaacttcagtgaccaaggtcgaggaggcttgaagctggccgtgatcggcatgcagcagcgtgtttccaccataaggtaaagagaagtgggcacaacaccattcccaggcacactgcctgtggcaactcatccttggctcttgaaactttgaatatgcaatcgacatgtagcttgagatcctcasaataaaccaaaccttcagttatatgcaagccttttttgaggttgctgttgctgtaaaaaaaaaaaaaaaaaaaaaaaaaaaaaaaaaaaaaaaaaaaaaaaaaaaccaaaaaaaaaaaaaaaa

SEQ ID NO: 1078 - DNA, 1569 bp, Zea mays
ggtcagttctgttcttgagcgcactgccaccacagattggacggcttgtctgctctccgttcccgagtggcgtcgtgctcactctgctgggttgctttgccttatagtcttgctctgcggtttgatttgcttcatctttttttttcttcaatcttgtcactcctaaggtttcccccctctggttttcttgattccccgcttgggaatttgtgaagtttaacaggatttttttggctgagttcgcatgtttctgttcttggccatgcccatgctatgcttgcttggataagctttggcttcagcctagctcgcattgcacgatgcgttgttcctacttcctagaatccgatcgcaagtcctatgagctgaccactatttcgtggattgcccggggcgtgggctgctgatggtttcggcaatttgggttaatttttaggtaccagatcatctgatttctcagaagcaaaatgttgtttggagctcagtgacaccatcttgtaatgcctgtgattttacgggaaatggaggatcattctgtccatcccatgtctaagtctaaccatggctccttgtcaggaaatggttatgagatgaaacattcaggccataaagtttgcgatagggattcatcatcggagtctgatcggtctcaccaagaagcatcagcagcaagtgaaagcagtccaaatgaacacacatcaactcaatcagacaatgatgaagatcatgggaaagataatcaggacacaatgaagccagtattgtccttggggaaggaaggctctgcctttttggccccaaaattacattacagcccatcttttgcttgtattccttatacttctgatgcttattatagtgcggttggggtcttgacaggatatcctccacatgccattgtccatccccagcaaaatgatacaacgaacactccgggtatgttacctgtggaacctgcagaagaaccaatatatgttaatgcaaaacaataccatgcaatccttaggaggaggcaaacacgtgctaaattggaggcccagaacaagatggtgaaaaatcggaagccatatcttcatgagtcccgacatcgtcatgccatgaaacgggctcgtggatcaggaggacggttcctcaacacaaagcagctccaggagcagaaccagcagtatcaggcatcgagtggttcattgtgctcaaagatcattgccaacagcataatctcccaaagtggccccacctgcacgccctcttctggcactgcaggtgcttcaacagccggccaggaccgcagctgcttgccctcagttggcttccgccccacgacaaacttcagtgaccaaggtcgaggaggcttgaagttggccgtgatcggcatgcagcagcgtgtttccaccataaggtgaagagaagtgggcacaacaccattcccaggcacactgcctgtggcaactcatccttggctcttggaactttgaatatgcaatcgacatgtagcttgagatcctcagaataaaccaaaccttcagttatatgcaagccttttttgaggttgcaaaaaaaaaaaaaaaa

SEQ ID NO: 1079 - DNA, 1329 bp, Zea mays
ctctctatctatacgattccgaagaaggtagagagagaaactcgaaggggagaggacagaagagggagatacaggttaatttttaggtaccagatcatctgatttctcagaagcaaaatgttgtttggagctcagtgacaccatcttgtaatgcctgtgattttacgggaaatggaggatcattctgtccatcccatgtctaagtctaaccatggctccttgtcaggaaatggttatgagatgaaacattcaggccataaagtttgcgatagggattcatcatcggagtctgatcggtctcaccaagaagcatcagcagcaagtgaaagcagtccaaatgaacacacatcaactcaatcagacaatgatgaagatcatgggaaagataatcaggacacaatgaagccagtattgtccttggggaaggaaggctctgcctttttggccccaaaattacattacagcccatcttttgcttgtattccttatacttctgatgcttattatagtgcggttggggtcttgacaggatatcctccacatgccattgtccatccccagcaaaatgatacaacgaacactccgggtatgttacctgtggaacctgcagaagaaccaatatatgttaatgcaaaacaataccatgcaatccttaggaggaggcaaacacgtgctaaattggaggcccagaacaagatggtgaaaaatcggaagccatatcttcatgagtcccgacatcgtcatgccatggaacgggctcgtggatcaggaggacggttcctcaacacaaagcagctccaggagcagaaccagcagtatcaggcatcgagtggttcattgtgctcaaagatcattgccaacagcataatctcccaaagtggccccacctgcacgccctcttctggcactgcaggtgcttcaacagccggccaggaccgcagctgcttgccctcagttggcttccgccccacgacaaacttcagtgaccaaggtcgaggaggcttgaagctggccgtgatcggcatgcagcagcgtgtttccaccataaggtgaagagaagtgggcacaacaccattcccaggcacactgcctgtggcaactcatccttggctcttggaactttgaatatgcaatcgacatgtagcttgagatcctcagaataaaccaaaccttcagttatatgcaagccttttttgaggttgctgttgctgtacctgagaactgtggttaggttatgagtttgttcctcaaaactgacccatacatgacatgctaccttgtgctgagtttctgagacaaagccatcgaaacatgatcttgtggttcagt

SEQ ID NO: 1080 - DNA, 1343 bp, Zea mays
tttctctatctatcgatacggttcaagggaccgaagaaggtagagagagaaacttgaaggggagaggaaggagatacaggttcatgttcatttaggtgtcagttcatctgatttctcagaagcaaaatgttgtttggagctcagtgacaccattttgtaatgcatgtgccttttacgggaaatggaggatcattatgtccatcccaagtctaagtctaaccatggctccttgtcaggaaatggttatgagatgaaaaatccaggccatgaagtttgtgatagggattcatcatcagagtctgatcgatctcacccagaagcatcagcagtgagtgaaagcagtctagatgaacacacatcaactcaatcagacaatgatgaagatcatgggaaggataatcaggacacattgaagccagtattgtccttggggaaggaagggtctgcctttttggccccaaaaatagattacaacccatcttttgcttatattccttatactgctgatgcttactatggtggcgttggggtcttgacaggatatgctccacataccattgtccatccccagcaaaatgatacaacaaatagtccggttatgttgcctgcggaacctgcagaagaagaaccaatatatgtcaatgcaaaacaataccatgcaatccttaggaggaggcagacacgtgctaaactggaggcgcagaacaagatggtgaaaggccggaagccataccttcatgagtctcgacaccgtcatgccatgaagcgggcccgtggctcaggagggcggttcctcaacacaaagcagcagccccaggagcagaaccagcagtaccaggcgtcgagtggttcaatgtgctcaaagaccattggcaacagcgtaatctcccaaagtggccccatttgcacgccctcttctgacgctgcaggtgcttcagcagccagccaggaccgcggctgcttgccctcggtgggcttccgccccacagccaacttcagtgagcaaggtggaggcggctcgaagctggtcgtgaacggcatgcagcagcgtgtttccaccataaggtgaagagaagtgggcacgacaccattcccaggcgcgcactgcctgtggcaactcatccttggcttttgaaactatggatatgcaatggacatgtagcttcgagttcctcagaataaccaaacgtgaagaatatgcaaagtccttttgagatttgctgtagctgaaagaactgtggttaggttatgagtttcttcctggagactgatccatacatgacatgctacctcgtgctgagtttctgaggtgaagccatcgaaacatgaccgtgtggttcagt

SEQ ID NO: 1081 - DNA, 1253 bp, Zea mays
agcttcgacgtatttctctatctatctatacggttcaagggactgaagaaggtagagagagaaacttgaaggggagaggaatgagatacaggttcatgttcatttaggtgtcagttcatctgatttctcagaagcaaaatgttgtttggagctcagtgacaccatcttgtaatgcatgtgccttttacgggaaatggaggatcattctgtccatccaaagtctaagtctaaccatggttccttgtcaggaaatggttatgagatgaaaaatccaggccatgaagtttgtgatagggattcatcatcagagtctgatcgatctcacccagaagcatcagcagtgagtgaaagcagtctagatgaacacacatcaactcaatcagacaatgatgaagatcatgggaaggataatcaggacacattgaagccagtattgtccttggggaaggaagggtctgcctttttggccccaaaaatagattacaacccgtcttttccttatattccttatactgctgacgcttactatggtggcgttggggtcttgacaggatatgctccgcatgccattgtccatccccagcaaaatgatacaacaaatagtccggttatgttgcctgcggaacctgcagaagaagaaccaatatatgtcaatgcaaaacaataccatgcgatccttaggaggaggcagacacgtgctaaactggaggcgcagaacaagatggtgaaaggtcggaagccataccttcatgagtctcgacaccgtcatgccatgaagcgggcccgtggctcaggagggcggttcctcaacacaaagcagcagctccaggagcagaaccagcagtaccaggcgtcgagtggttcaatgtgctcaaagaccattggcgacagcgtaatctcccaaagtggccccatttgcacgccctcttctgacgctgcaggtgcttcagcagccagccaggaccgcggctgcttgccctcggttggcttccgccccacagccaacttcagtgagcaaggtggaggcggctcgaagctggtcgtgaacggcatgcagcagcgtgtttccaccataaggtgaagagaagtgggcacgacaccattcccaggcgcgcactgcctgtggcaactcatccttggcttttgaaactatgaatatgcaatggacatgtagctttgagttcctcagaataaccaaacgcgaagaatatgcaaagtccttttgagatttgctgtaaaaaaaaaaaaaaaaa

SEQ ID NO: 1082 - DNA, 1397 bp, Zea mays
gattttctagagtattttccactgtccaaacatctgagatgaaaaaaaaaccctggctgatgatgctaatgagataatccactgaaagcagataccacttagcactgcaatagatgtaaagctgtaactgataaagtagggtcgcaatccaatacgcatacgcttgtcctttagcttgttattgtcaactcagctaattcaacgctgactacttgccgcaaaggttcatgttcatttaggtgtcagttcatctgatttctcagaagcaaaatgttgtttggagctcagtgacaccatcttgtaatgcatgtgccttttacgggaaatggaggatcattctgtccatccaaagtctaagtctaaccatggttccttgtcaggaaatggttatgagatgaaaaatccaggccatgaagtttgtgatagggattcatcatcagagtctgatcgatctcacccagaagcatcagcagtgagtgaaagcagtctagatgaacacacatcaactcaatcagacaatgatgaagatcatgggaaggataatcaggacacattgaagccagtattgtccttggggaaggaagggtctgcctttttggccccaaaaatagattacaacccgtcttttccttatattccttatactgctgacgcttactatggtggcgttggggtcttgacaggatatgctccgcatgccattgtccatccccagcaaaatgatacaacaaatagtccggttatgttgcctgcggaacctgcagaagaagaaccaatatatgtcaatgcaaaacaataccatgcgatccttaggaggaggcagacacgtgctaaactggaggcgcaaaacaagatggtgaaaggtcggaagccgtaccttcgtgagtctcgacaccgtcatgccatgaagcgggcccgtggctcaggagggcggttcctcaacacaaagcagcagctccaggagcagaaccagcagtaccaggcgtcgagtggttcaatgtgctcaaagaccattggcgacagcgtaatctcccaaagtggccccatttgcacgccctcttctgacgctgcaggtgcttcagcagccagccaggaccgcggctgcttgccctcggttggcttccgccccacagccaacttcagtgagcaaggtggaggcggctcgaagctggtcgtgaacggcatgcagcagcgtgtttccaccataaggtgaagagaagtgggcacgacaccattcccaggcgcgcactgcctgtggcaactcatccttggcttttgaaactatgaatatgcaatggacatgtagctttgagttcctcagaataaccaaacgcgaagaatatgcaaagtcctttgaaaaaaaaaaaaaaaaaaaaaaataaaaaaaaaaaaaaaaa

SEQ ID NO: 1083 - DNA, 1569 bp, Zea mays; identical to SEQ ID NO: 1078

SEQ ID NO: 1084 - DNA, 1329 bp, Zea mays; identical to SEQ ID NO: 1079

SEQ ID NO: 1085 - DNA, 1314 bp, Zea mays; identical to SEQ ID NO: 1077

SEQ ID NO: 1086 - DNA, 1343 bp, Zea mays; identical to SEQ ID NO: 1080

SEQ ID NO: 1087 - DNA, 1253 bp, Zea mays; identical to SEQ ID NO: 1081

SEQ ID NO: 1088 - DNA, 1397 bp, Zea mays; identical to SEQ ID NO: 1082

SEQ ID NO: 1089 - DNA, 1265 bp, Zea mays
ggagtgatgcagccgagggggccagaccagaggaagggacggcggggaggtggcaaggcgcagagagcaggttcgtttggcggacgcaccgagggaggcgtgtgggagccatgcttcttccctcttcgtcttccgcttccgcttccgcttccgcttccgcttccaaaggtaactcctttgggaaaaccgttaacgatcatctgaggtcaactttgagttttgataacaagcaacctccatttgcaagtcaaaactttgactacggtcaaacaatagcttgcatttcatacccgtacaatcgttctagatcaggagatgtttgggcagcctatgagtcacgcaccagcactgccactgtgttccgttcccaaattgctggtgggggttcatccacaagaattcccttgcctttggaattagcagagaatgaacccatatatgttaatcccaaacaatatcacgggatacttcgcagaagacagttacgtgccaagttagaggctcagaacaagctagtcagagcccgaaagccttaccttcatgagtctaggcatcttcatgcaatgaagagggcacgaggttccggtggacgattcctcaacactaagcagctccagcagtctcacactgccctcaccaggtccaacaccacaagtggcacaagctcctcaggctcaactcatctgcggcttggtggtggcgcagccgcagctggagatcgatctgtgctggcacccaaaacaatggcctcacaagacagtagcaagaaggctgtttcttcagctctcgccttcactgtgactccaatgctgcgcagagatgacggcttcttgcagcacccaagccatcttttcagtttttctggtcattttgggcaggcaagcgcgcaagctggcgtccataatggaagtcagcatagggttccagttatgagatgacaggtttgcgaaccatagctggtgatccaggcgtctagggtcaacttcgctgtggtgtcttagtctctcaggcaattcatccttggcttaatttctggctttttattagaaggtaccaaaatgtgttccataccgttgtggccacagagcccataaaccagggggtttgatggttggcactcctacccaaactattgttgcagtggtgtttgttagaataaaccttgactattattctgtacaatttgcctttatcttgtactgccaattattgtgtagtggtcacctgtccagtttatggcctcaagactaaaaaaaaaaaaaaaa

SEQ ID NO: 1090 - DNA, 1336 bp, Zea mays
ttcttgcttccagcaaccgttcgtctagccggcctgacgtcgcggcgcccaacacggcaacgcgcctttttcttccgcacgctgcgctggcccccttctcttggtatgtcaaataccacgacctccatggaggcaaacaagaatcaaggaagtcaaattacaccgatttggcaaacaagtactatgatcttgtcactggcttttacgaatatggatggggcgactcattccatcttgctggcggatatccgggtgagacttcccgtgaagccattaagcggcaccagcattttttggcactacaattggggctcaagaagggtatgaaggttttggatgtgggatgtggaattgggggacctttaatagaaatcgccagattcagctcaacatcgataactggactgaacaacaatgactaccacatctcaaggggcaaggagctcattttttcagcaggtttgagtgagcaatgctgcttcttgaagggggacttcatggacatgccaatatctgataacacctttgatgcggcctatgcaatacaggctacatgtcatgcaccagatgcacaaggcgtctatagtgaggtctaccgtgtgctgaaacctgggcagtattttgcactggatgaatggtgcttgaccgaccgatttgatcccaacaacgccaagcatttggccatcaaggctgagattgagctcggtgatggcctacctgacatccgtaccactcgccaatgtgtccaagctatgaaagatgcaggatttgaggtcgtttttgcaaaggatcttgctcaagtttttccttgcccgtggtaccgggtgatggatcccacctacttttcatgggctcacttccaatgcacacgcccaggacggatcgtcacccgtgcaattgtcaatacactagagttcctccgtattgccccagcaggcagcatgggagcctacaacgtcctgatgagtgcctctgatggccttctaaaaggtggccgggaaggtatcttcacagcgaccttcttcgtcctgggccgcaagcctctcaaggaagttgatatagtaagcctctcaaggaagttgatatagtgaacggcggcgtcctttgagctgcaagattagtatggggctgtactcataagagctatgaatcatggccaacgtgttctgtgctgaggtgtgtttactggattgtcttatgggttatggcccttgcgctgtgtgctggcctgctgggtcatgttcccgcagtagcctgtatctgcttgtcagcttgtgtgctgtgtactatgcactatctgaataaaaatgcagttttacgcattgttattaatcgc

SEQ ID NO: 1091 - DNA, 24 bp, Artificial sequence
  Single strand DNA oligonucleotide
ggcagaagagagagagtacagcct

SEQ ID NO: 1092 - DNA, 23 bp, Artificial sequence
  Single strand DNA oligonucleotide
gctagccagggatgatttgcctg

SEQ ID NO: 1093 - DNA, 21 bp, Artificial sequence
  Single strand DNA oligonucleotide
aggatgctgacgcaatgggat

SEQ ID NO: 1094 - DNA, 25 bp, Artificial sequence
  Single strand DNA oligonucleotide
tggcttagatgaccatcagcaaaca

SEQ ID NO: 1095 - DNA, 23 bp, Artificial sequence
  Single strand DNA oligonucleotide
gcgtgaagtgtttgggggaactc

SEQ ID NO: 1096 - DNA, 22 bp, Artificial sequence
  Single strand DNA oligonucleotide
ctagccaagcatgatttgcccg

SEQ ID NO: 1097 - DNA, 23 bp, Artificial sequence
  Single strand DNA oligonucleotide
caggatgtgaggctattggggac

SEQ ID NO: 1098 - DNA, 22 bp, Artificial sequence
  Single strand DNA oligonucleotide
ccaagtcgagggcagaccaggc

SEQ ID NO: 1099 - DNA, 21 bp, Artificial sequence
  Single strand DNA oligonucleotide
attcacggggacgaacctcct

SEQ ID NO: 1100 - DNA, 24 bp, Artificial sequence
  Single strand DNA oligonucleotide
ggcggaatcttgatgatgctgcat

SEQ ID NO: 1101 - protein, 626 aa, Zea mays; identical to SEQ ID NO: 858

SEQ ID NO: 1102 - DNA, 2195 bp, Zea mays; identical to SEQ ID NO: 898

SEQ ID NO: 1103 - DNA, 1878 bp, Zea mays
atgcccggcctgcctctgcctcaatcgttaaatcagaatattggatgtgaatatgcctatcctgggtctacaggccaggccttccgtcagcagctaagaactgcattgtctccagatgagaaacttaccgctgaaaaagatttggctctgtattgcaagccagtcgagctctacaatattattcaacggcgagccatgaaaaatcccctttttattcaaagatgccttctttataatatacatgcgaggaggaaaaagaggattcagataaccatatcactttctggaagtacaaatactgagttgcaaacacattatgtctttcctctttatgttctgttagctagacccactagtaacctttcacttgaagggcattctccaatttatcgattcagtcgggtttgcttgcttacttcctttagtgaacatggaaataaggacaacagtgaagctacattcatcattcctgacgtgaagagtttgtcaacctcccgtgcttgcaaccatgatattatctttattagctgtgggcaagttggacaaagtaatggtgaagataactgctctgggaaccatgtggaagattcttctctccaaatgcttgaagggaaatgctcctggggtaaaataccaactaatttacttgcttcatctttggagagttgtgtcaatttaagtttgggacatattgtggagttggcatctaaagttacaatgagaccaagcttcttagagccaaaatttctggagcaagacagttgcttgacattttgctctcataaggttgatgctgtgggttcatataaactacaactatgcatgtccgcacaagaggctggtgcaagagatatgtctttgtctccatatagtagttactcatataatgatgtcccaccttcgtcattatcagatatcataaggttaagatctggcaatgtactttttaattacaagtactacaataatacaatgcaagagactgaagtcactgaagatttctcttgtccattttgctatgtacgatgtggaagcttcaagggtctaggatgccatttaaactcatcacatgatctattccactatgagttttggatatctgaagagtaccaggttgttaatgttagtctgaaggctgatgcttggagaacagagctttttgcggagggcgttgatccaaggcatcaaacattttcttatcgctcaaggtttaagaagcgtagacgatcaaagaacacaatggagaaaatcaggcatgtacactcacatattatggaatcaggttcacctgaagatgaggcaggatctgaggacaactttgtgcaaggggagaatgggacttctgtagcaaatgcttcgattgatcctgctcaatctttacatggcagcaatctttcaccaccaacagtactacagtttgggaagacaaggaagctatctgagagatctgaccctagaaatcggcaactcctgcaaaaacgacagttcttccattctcacagggcgcagccaatgcaactggagcaagtgttctcggaccgtgatagtgaagatgaagttgatgatgatattgctgacttcgaggatagaagaatgcttgatgattttgttgatgttacgaaagatgaaaaacttattatgcatatgtggaattcatttgttcgaaaacaaagagtgttagctgatggtcatataccttgggcctgcgaggcattctcccagttgcatggacgacaacttatacaaaatcctgctctgctgtggggttggcgtttcttcatgattaaactttggaaccataacattttagatgcccgcactatgaacacatgcaatacagtccttcaaattttacaagaagaaagcacaggactaaag

SEQ ID NO: 1104 - DNA, 1878 bp, Artificial sequence
  MiR ressistant mutated nucleic acid sequence
atgcccggcctgcctctgcctcaatcgttaaatcagaatattggatgtgaatatgcctatcctgggtctacaggccaggccttccgtcagcagctaagaactgcattgtctccagatgagaaacttaccgctgaaaaagatttggctctgtattgcaagccagtcgagctctacaatattattcaacggcgagccatgaaaaatcccctttttattcaaagatgccttctttataatatacatgcgaggaggaaaaagaggattcagataaccatatcactttctggaagtacaaatactgagttgcaaacacattatgtctttcctctttatgttctgttagctagacccactagtaacctttcacttgaagggcattctccaatttatcgattcagtcgggtttgcttgcttacttcctttagtgaacatggaaataaggacaacagtgaagctacattcatcattcctgacgtgaagagtttgtcaacctcccgtgcttgcaaccatgatattatctttattagctgtgggcaagttggacaaagtaatggtgaagataactgctctgggaaccatgtggaagattcttctctccaaatgcttgaagggaaatgctcctggggtaaaataccaactaatttacttgcttcatctttggagagttgtgtcaatttaagtttgggacatattgtggagttggcatctaaagttacaatgagaccaagcttcttagagccaaaatttctggagcaagacagttgcttgacattttgctctcataaggttgatgctgtgggttcatataaactacaactatgcatgtccgcacaagaggctggtgcaagagatatgtctttgtctccatatagtagttactcatataatgatgtcccaccttcgtcattatcagatatcataaggttaagatctggcaatgtactttttaattacaagtactacaataatacaatgcaagagactgaagtcactgaagatttctcttgtccattttgctatgtacgatgtggaagcttcaagggtctaggatgccatttaaactcatcacatgatctattccactatgagttttggatatctgaagagtaccaggttgttaatgttagtctgaaggctgatgcttggagaacagagctttttgcggagggcgttgatccaaggcatcaaacattttcttatcgctcaaggtttaagaagcgtagacgatcaaagaacacaatggagaaaatcaggcatgtacactcacatattatggaatcaggttcacctgaagatgaggcaggatctgaggacaactttgtgcaaggggagaatgggacttctgtagcaaatgcttcgattgatcctgctcaatctttacatggcagcaatctttcaccaccaacagtactacagtttgggaagacaaggaagctatctgagagatctgaccctagaaatcggcaactcctgcaaaaacgacagttcttccattctcacagggcgcagccaatgcaactggagcaagtgttctcggaccgtgatagtgaagatgaagttgatgatgatattgctgacttcgaggatagaagaatgcttgatgattttgttgatgttacgaaagatgaaaaacttattatgcatatgtggaattcatttgttcgaaaacaaagagtactcgcagacggacacatcccatgggcctgcgaggcattctcccagttgcatggacgacaacttatacaaaatcctgctctgctgtggggttggcgtttcttcatgattaaactttggaaccataacattttagatgcccgcactatgaacacatgcaatacagtccttcaaattttacaagaagaaagcacaggactaaag

SEQ ID NO: 1105 - DNA, 1878 bp, Artificial sequence
  MiR ressistant mutated nucleic acid sequence
atgcccggcctgcctctgcctcaatcgttaaatcagaatattggatgtgaatatgcctatcctgggtctacaggccaggccttccgtcagcagctaagaactgcattgtctccagatgagaaacttaccgctgaaaaagatttggctctgtattgcaagccagtcgagctctacaatattattcaacggcgagccatgaaaaatcccctttttattcaaagatgccttctttataatatacatgcgaggaggaaaaagaggattcagataaccatatcactttctggaagtacaaatactgagttgcaaacacattatgtctttcctctttatgttctgttagctagacccactagtaacctttcacttgaagggcattctccaatttatcgattcagtcgggtttgcttgcttacttcctttagtgaacatggaaataaggacaacagtgaagctacattcatcattcctgacgtgaagagtttgtcaacctcccgtgcttgcaaccatgatattatctttattagctgtgggcaagttggacaaagtaatggtgaagataactgctctgggaaccatgtggaagattcttctctccaaatgcttgaagggaaatgctcctggggtaaaataccaactaatttacttgcttcatctttggagagttgtgtcaatttaagtttgggacatattgtggagttggcatctaaagttacaatgagaccaagcttcttagagccaaaatttctggagcaagacagttgcttgacattttgctctcataaggttgatgctgtgggttcatataaactacaactatgcatgtccgcacaagaggctggtgcaagagatatgtctttgtctccatatagtagttactcatataatgatgtcccaccttcgtcattatcagatatcataaggttaagatctggcaatgtactttttaattacaagtactacaataatacaatgcaagagactgaagtcactgaagatttctcttgtccattttgctatgtacgatgtggaagcttcaagggtctaggatgccatttaaactcatcacatgatctattccactatgagttttggatatctgaagagtaccaggttgttaatgttagtctgaaggctgatgcttggagaacagagctttttgcggagggcgttgatccaaggcatcaaacattttcttatcgctcaaggtttaagaagcgtagacgatcaaagaacacaatggagaaaatcaggcatgtacactcacatattatggaatcaggttcacctgaagatgaggcaggatctgaggacaactttgtgcaaggggagaatgggacttctgtagcaaatgcttcgattgatcctgctcaatctttacatggcagcaatctttcaccaccaacagtactacagtttgggaagacaaggaagctatctgagagatctgaccctagaaatcggcaactcctgcaaaaacgacagttcttccattctcacagggcgcagccaatgcaactggagcaagtgttctcggaccgtgatagtgaagatgaagttgatgatgatattgctgacttcgaggatagaagaatgcttgatgattttgttgatgttacgaaagatgaaaaacttattatgcatatgtggaattcatttgttcgaaaacaaagagtgctcgcagacggacacatcccatgggcctgcgaggcattctcccagttgcatggacgacaacttatacaaaatcctgctctgctgtggggttggcgtttcttcatgattaaactttggaaccataacattttagatgcccgcactatgaacacatgcaatacagtccttcaaattttacaagaagaaagcacaggactaaag

SEQ ID NO: 1106 - DNA, 1878 bp, Artificial sequence; identical to SEQ ID NO: 1105
  MiR ressistant mutated nucleic acid sequence

SEQ ID NO: 1107 - DNA, 1878 bp, Artificial sequence; identical to SEQ ID NO: 1105
  MiR ressistant mutated nucleic acid sequence

SEQ ID NO: 1108 - DNA, 1878 bp, Artificial sequence
  MiR ressistant mutated nucleic acid sequence
atgcccggcctgcctctgcctcaatcgttaaatcagaatattggatgtgaatatgcctatcctgggtctacaggccaggccttccgtcagcagctaagaactgcattgtctccagatgagaaacttaccgctgaaaaagatttggctctgtattgcaagccagtcgagctctacaatattattcaacggcgagccatgaaaaatcccctttttattcaaagatgccttctttataatatacatgcgaggaggaaaaagaggattcagataaccatatcactttctggaagtacaaatactgagttgcaaacacattatgtctttcctctttatgttctgttagctagacccactagtaacctttcacttgaagggcattctccaatttatcgattcagtcgggtttgcttgcttacttcctttagtgaacatggaaataaggacaacagtgaagctacattcatcattcctgacgtgaagagtttgtcaacctcccgtgcttgcaaccatgatattatctttattagctgtgggcaagttggacaaagtaatggtgaagataactgctctgggaaccatgtggaagattcttctctccaaatgcttgaagggaaatgctcctggggtaaaataccaactaatttacttgcttcatctttggagagttgtgtcaatttaagtttgggacatattgtggagttggcatctaaagttacaatgagaccaagcttcttagagccaaaatttctggagcaagacagttgcttgacattttgctctcataaggttgatgctgtgggttcatataaactacaactatgcatgtccgcacaagaggctggtgcaagagatatgtctttgtctccatatagtagttactcatataatgatgtcccaccttcgtcattatcagatatcataaggttaagatctggcaatgtactttttaattacaagtactacaataatacaatgcaagagactgaagtcactgaagatttctcttgtccattttgctatgtacgatgtggaagcttcaagggtctaggatgccatttaaactcatcacatgatctattccactatgagttttggatatctgaagagtaccaggttgttaatgttagtctgaaggctgatgcttggagaacagagctttttgcggagggcgttgatccaaggcatcaaacattttcttatcgctcaaggtttaagaagcgtagacgatcaaagaacacaatggagaaaatcaggcatgtacactcacatattatggaatcaggttcacctgaagatgaggcaggatctgaggacaactttgtgcaaggggagaatgggacttctgtagcaaatgcttcgattgatcctgctcaatctttacatggcagcaatctttcaccaccaacagtactacagtttgggaagacaaggaagctatctgagagatctgaccctagaaatcggcaactcctgcaaaaacgacagttcttccattctcacagggcgcagccaatgcaactggagcaagtgttctcggaccgtgatagtgaagatgaagttgatgatgatattgctgacttcgaggatagaagaatgcttgatgattttgttgatgttacgaaagatgaaaaacttattatgcatatgtggaattcatttgttcgaaaacaaagagtattagcagacggacacatcccatgggcctgcgaggcattctcccagttgcatggacgacaacttatacaaaatcctgctctgctgtggggttggcgtttcttcatgattaaactttggaaccataacattttagatgcccgcactatgaacacatgcaatacagtccttcaaattttacaagaagaaagcacaggactaaag

SEQ ID NO: 1109 - DNA, 1878 bp, Artificial sequence; identical to SEQ ID NO: 1108
  MiR ressistant mutated nucleic acid sequence

SEQ ID NO: 1110 - DNA, 1878 bp, Artificial sequence; identical to SEQ ID NO: 1108
  MiR ressistant mutated nucleic acid sequence

SEQ ID NO: 1111 - DNA, 1878 bp, Artificial sequence
  MiR ressistant mutated nucleic acid sequence
atgcccggcctgcctctgcctcaatcgttaaatcagaatattggatgtgaatatgcctatcctgggtctacaggccaggccttccgtcagcagctaagaactgcattgtctccagatgagaaacttaccgctgaaaaagatttggctctgtattgcaagccagtcgagctctacaatattattcaacggcgagccatgaaaaatcccctttttattcaaagatgccttctttataatatacatgcgaggaggaaaaagaggattcagataaccatatcactttctggaagtacaaatactgagttgcaaacacattatgtctttcctctttatgttctgttagctagacccactagtaacctttcacttgaagggcattctccaatttatcgattcagtcgggtttgcttgcttacttcctttagtgaacatggaaataaggacaacagtgaagctacattcatcattcctgacgtgaagagtttgtcaacctcccgtgcttgcaaccatgatattatctttattagctgtgggcaagttggacaaagtaatggtgaagataactgctctgggaaccatgtggaagattcttctctccaaatgcttgaagggaaatgctcctggggtaaaataccaactaatttacttgcttcatctttggagagttgtgtcaatttaagtttgggacatattgtggagttggcatctaaagttacaatgagaccaagcttcttagagccaaaatttctggagcaagacagttgcttgacattttgctctcataaggttgatgctgtgggttcatataaactacaactatgcatgtccgcacaagaggctggtgcaagagatatgtctttgtctccatatagtagttactcatataatgatgtcccaccttcgtcattatcagatatcataaggttaagatctggcaatgtactttttaattacaagtactacaataatacaatgcaagagactgaagtcactgaagatttctcttgtccattttgctatgtacgatgtggaagcttcaagggtctaggatgccatttaaactcatcacatgatctattccactatgagttttggatatctgaagagtaccaggttgttaatgttagtctgaaggctgatgcttggagaacagagctttttgcggagggcgttgatccaaggcatcaaacattttcttatcgctcaaggtttaagaagcgtagacgatcaaagaacacaatggagaaaatcaggcatgtacactcacatattatggaatcaggttcacctgaagatgaggcaggatctgaggacaactttgtgcaaggggagaatgggacttctgtagcaaatgcttcgattgatcctgctcaatctttacatggcagcaatctttcaccaccaacagtactacagtttgggaagacaaggaagctatctgagagatctgaccctagaaatcggcaactcctgcaaaaacgacagttcttccattctcacagggcgcagccaatgcaactggagcaagtgttctcggaccgtgatagtgaagatgaagttgatgatgatattgctgacttcgaggatagaagaatgcttgatgattttgttgatgttacgaaagatgaaaaacttattatgcatatgtggaattcatttgttcgaaaacaaagagtactcgctgacggacacatcccatgggcctgcgaggcattctcccagttgcatggacgacaacttatacaaaatcctgctctgctgtggggttggcgtttcttcatgattaaactttggaaccataacattttagatgcccgcactatgaacacatgcaatacagtccttcaaattttacaagaagaaagcacaggactaaag

SEQ ID NO: 1112 - DNA, 1878 bp, Artificial sequence; identical to SEQ ID NO: 1111
  MiR ressistant mutated nucleic acid sequence

SEQ ID NO: 1113 - DNA, 1878 bp, Artificial sequence; identical to SEQ ID NO: 1111
  MiR ressistant mutated nucleic acid sequence

SEQ ID NO: 1114 - protein, 507 aa, Zea mays; identical to SEQ ID NO: 890

SEQ ID NO: 1115 - DNA, 2607 bp, Zea mays; identical to SEQ ID NO: 923

SEQ ID NO: 1116 - DNA, 1521 bp, Zea mays
atgacgcctccagttgcctctttgctaccggaaagagcggcaccacttataaataaaaaggttgtgacgagatggaggcctctcaagctggtgtatgaccacgacattaggcttgggcaggttccagagaaatgcagcttccgaacacttcgtgagtttgtagctaagaggttcccatcatccaaggcagtgttgattaaatataaggatgctgatggtgatctagttaccatcacatcaacagaagagctccggttagctgaattattcattgataaagttggccacgaggttgtagaaaatgggagggaggatgacaataagctcccggtgttgaggctgcaccttgttgaagttagcccagaacaggaaccaactttgccattggaagaagagaagttggaggaggatgaggaattgttgatcaatggtgaagatagcactttacatgctttagcagtggtaaccgacgcagaggtggtgaagcaagatgttgagaacagatctgctgatcaaagtgtggagacagggaagaatgattgtggccatgccgagtgcaaggaagctgagattgatgattggttgcttcagtttgcagatttgttccggaaccaggttgggattgatgcagatgcacatttagacctgcatgagttgggcatggagctgtgctccgaggctctcgaggaaactgtgacaagcatggaggctcaggtcctttttgagttggctgcttctaaatttcaggaggttgctgctttggccttattcaattggggaaatgtgcacatgtgtgaagcaaggaagcgcatccctctcgatgaatctgctccaaaggaagtcatggctgctcagctccgcacagcttattattgggtgaaggagaggtatgctcttgcagggcacaaatatgaggaggcccttaaaatcaagccagacttccatgaagggcttcttgctttaggccagcaacacttcgagactgcaaagcttcattggtcatatgcactggcagataaggctgacctatctacctgggattctttggaaacattcaagctttttgatagcgctgagcagaacatgagggctgcaacagagatgtgggagaaggtggaagaacagagaatggcagagttaaaagaaccaggcgcatgtgataaggatggggtactgaggaaaaggcagcacggtgcaggtggtcaaccggagttgacaccagaagaagcagctgagcaggcagcagtaatgaggcaacagattcacctcttctggggtaatatgcttttcgagcgttcccaagtggagtttaagctcagtgttggtgactggaagacaaatcttgatgcatctgttgaaaggtttaagttggctggagcttcagaatcagatattttgacagtgttgaaaaatcacttttctaatgtagcctctgagtgtgaagagaagaaagtcatgacttcaggcacagaaatttcccaaacaaatgacaatgttgaggataagtgtgtggttgaaacc

SEQ ID NO: 1117 - DNA, 1521 bp, Artificial sequence
  MiR ressistant mutated nucleic acid sequence
atgacgcctccagttgcctctttgctaccggaaagagcggcaccacttataaataaaaaggttgtgacgagatggaggcctctcaagctggtgtatgaccacgacattaggcttgggcaggttccagagaaatgcagcttccgaacacttcgtgagtttgtagctaagaggttcccatcatccaaggcagtgttgattaaatataaagacgcagacggagacttggtaaccatcacatcaacagaagagctccggttagctgaattattcattgataaagttggccacgaggttgtagaaaatgggagggaggatgacaataagctcccggtgttgaggctgcaccttgttgaagttagcccagaacaggaaccaactttgccattggaagaagagaagttggaggaggatgaggaattgttgatcaatggtgaagatagcactttacatgctttagcagtggtaaccgacgcagaggtggtgaagcaagatgttgagaacagatctgctgatcaaagtgtggagacagggaagaatgattgtggccatgccgagtgcaaggaagctgagattgatgattggttgcttcagtttgcagatttgttccggaaccaggttgggattgatgcagatgcacatttagacctgcatgagttgggcatggagctgtgctccgaggctctcgaggaaactgtgacaagcatggaggctcaggtcctttttgagttggctgcttctaaatttcaggaggttgctgctttggccttattcaattggggaaatgtgcacatgtgtgaagcaaggaagcgcatccctctcgatgaatctgctccaaaggaagtcatggctgctcagctccgcacagcttattattgggtgaaggagaggtatgctcttgcagggcacaaatatgaggaggcccttaaaatcaagccagacttccatgaagggcttcttgctttaggccagcaacacttcgagactgcaaagcttcattggtcatatgcactggcagataaggctgacctatctacctgggattctttggaaacattcaagctttttgatagcgctgagcagaacatgagggctgcaacagagatgtgggagaaggtggaagaacagagaatggcagagttaaaagaaccaggcgcatgtgataaggatggggtactgaggaaaaggcagcacggtgcaggtggtcaaccggagttgacaccagaagaagcagctgagcaggcagcagtaatgaggcaacagattcacctcttctggggtaatatgcttttcgagcgttcccaagtggagtttaagctcagtgttggtgactggaagacaaatcttgatgcatctgttgaaaggtttaagttggctggagcttcagaatcagatattttgacagtgttgaaaaatcacttttctaatgtagcctctgagtgtgaagagaagaaagtcatgacttcaggcacagaaatttcccaaacaaatgacaatgttgaggataagtgtgtggttgaaacc

SEQ ID NO: 1118 - DNA, 1521 bp, Artificial sequence
  MiR ressistant mutated nucleic acid sequence
atgacgcctccagttgcctctttgctaccggaaagagcggcaccacttataaataaaaaggttgtgacgagatggaggcctctcaagctggtgtatgaccacgacattaggcttgggcaggttccagagaaatgcagcttccgaacacttcgtgagtttgtagctaagaggttcccatcatccaaggcagtgttgattaaatataaggacgcagacggagacttggtaaccatcacatcaacagaagagctccggttagctgaattattcattgataaagttggccacgaggttgtagaaaatgggagggaggatgacaataagctcccggtgttgaggctgcaccttgttgaagttagcccagaacaggaaccaactttgccattggaagaagagaagttggaggaggatgaggaattgttgatcaatggtgaagatagcactttacatgctttagcagtggtaaccgacgcagaggtggtgaagcaagatgttgagaacagatctgctgatcaaagtgtggagacagggaagaatgattgtggccatgccgagtgcaaggaagctgagattgatgattggttgcttcagtttgcagatttgttccggaaccaggttgggattgatgcagatgcacatttagacctgcatgagttgggcatggagctgtgctccgaggctctcgaggaaactgtgacaagcatggaggctcaggtcctttttgagttggctgcttctaaatttcaggaggttgctgctttggccttattcaattggggaaatgtgcacatgtgtgaagcaaggaagcgcatccctctcgatgaatctgctccaaaggaagtcatggctgctcagctccgcacagcttattattgggtgaaggagaggtatgctcttgcagggcacaaatatgaggaggcccttaaaatcaagccagacttccatgaagggcttcttgctttaggccagcaacacttcgagactgcaaagcttcattggtcatatgcactggcagataaggctgacctatctacctgggattctttggaaacattcaagctttttgatagcgctgagcagaacatgagggctgcaacagagatgtgggagaaggtggaagaacagagaatggcagagttaaaagaaccaggcgcatgtgataaggatggggtactgaggaaaaggcagcacggtgcaggtggtcaaccggagttgacaccagaagaagcagctgagcaggcagcagtaatgaggcaacagattcacctcttctggggtaatatgcttttcgagcgttcccaagtggagtttaagctcagtgttggtgactggaagacaaatcttgatgcatctgttgaaaggtttaagttggctggagcttcagaatcagatattttgacagtgttgaaaaatcacttttctaatgtagcctctgagtgtgaagagaagaaagtcatgacttcaggcacagaaatttcccaaacaaatgacaatgttgaggataagtgtgtggttgaaacc

SEQ ID NO: 1119 - DNA, 1521 bp, Artificial sequence
  MiR ressistant mutated nucleic acid sequence
atgacgcctccagttgcctctttgctaccggaaagagcggcaccacttataaataaaaaggttgtgacgagatggaggcctctcaagctggtgtatgaccacgacattaggcttgggcaggttccagagaaatgcagcttccgaacacttcgtgagtttgtagctaagaggttcccatcatccaaggcagtgttgattaaatataaagatgcagatggagatttggtaaccatcacatcaacagaagagctccggttagctgaattattcattgataaagttggccacgaggttgtagaaaatgggagggaggatgacaataagctcccggtgttgaggctgcaccttgttgaagttagcccagaacaggaaccaactttgccattggaagaagagaagttggaggaggatgaggaattgttgatcaatggtgaagatagcactttacatgctttagcagtggtaaccgacgcagaggtggtgaagcaagatgttgagaacagatctgctgatcaaagtgtggagacagggaagaatgattgtggccatgccgagtgcaaggaagctgagattgatgattggttgcttcagtttgcagatttgttccggaaccaggttgggattgatgcagatgcacatttagacctgcatgagttgggcatggagctgtgctccgaggctctcgaggaaactgtgacaagcatggaggctcaggtcctttttgagttggctgcttctaaatttcaggaggttgctgctttggccttattcaattggggaaatgtgcacatgtgtgaagcaaggaagcgcatccctctcgatgaatctgctccaaaggaagtcatggctgctcagctccgcacagcttattattgggtgaaggagaggtatgctcttgcagggcacaaatatgaggaggcccttaaaatcaagccagacttccatgaagggcttcttgctttaggccagcaacacttcgagactgcaaagcttcattggtcatatgcactggcagataaggctgacctatctacctgggattctttggaaacattcaagctttttgatagcgctgagcagaacatgagggctgcaacagagatgtgggagaaggtggaagaacagagaatggcagagttaaaagaaccaggcgcatgtgataaggatggggtactgaggaaaaggcagcacggtgcaggtggtcaaccggagttgacaccagaagaagcagctgagcaggcagcagtaatgaggcaacagattcacctcttctggggtaatatgcttttcgagcgttcccaagtggagtttaagctcagtgttggtgactggaagacaaatcttgatgcatctgttgaaaggtttaagttggctggagcttcagaatcagatattttgacagtgttgaaaaatcacttttctaatgtagcctctgagtgtgaagagaagaaagtcatgacttcaggcacagaaatttcccaaacaaatgacaatgttgaggataagtgtgtggttgaaacc

SEQ ID NO: 1120 - DNA, 1521 bp, Artificial sequence
  MiR ressistant mutated nucleic acid sequence
atgacgcctccagttgcctctttgctaccggaaagagcggcaccacttataaataaaaaggttgtgacgagatggaggcctctcaagctggtgtatgaccacgacattaggcttgggcaggttccagagaaatgcagcttccgaacacttcgtgagtttgtagctaagaggttcccatcatccaaggcagtgttgattaaatataaagacgctgacggagacttggtaaccatcacatcaacagaagagctccggttagctgaattattcattgataaagttggccacgaggttgtagaaaatgggagggaggatgacaataagctcccggtgttgaggctgcaccttgttgaagttagcccagaacaggaaccaactttgccattggaagaagagaagttggaggaggatgaggaattgttgatcaatggtgaagatagcactttacatgctttagcagtggtaaccgacgcagaggtggtgaagcaagatgttgagaacagatctgctgatcaaagtgtggagacagggaagaatgattgtggccatgccgagtgcaaggaagctgagattgatgattggttgcttcagtttgcagatttgttccggaaccaggttgggattgatgcagatgcacatttagacctgcatgagttgggcatggagctgtgctccgaggctctcgaggaaactgtgacaagcatggaggctcaggtcctttttgagttggctgcttctaaatttcaggaggttgctgctttggccttattcaattggggaaatgtgcacatgtgtgaagcaaggaagcgcatccctctcgatgaatctgctccaaaggaagtcatggctgctcagctccgcacagcttattattgggtgaaggagaggtatgctcttgcagggcacaaatatgaggaggcccttaaaatcaagccagacttccatgaagggcttcttgctttaggccagcaacacttcgagactgcaaagcttcattggtcatatgcactggcagataaggctgacctatctacctgggattctttggaaacattcaagctttttgatagcgctgagcagaacatgagggctgcaacagagatgtgggagaaggtggaagaacagagaatggcagagttaaaagaaccaggcgcatgtgataaggatggggtactgaggaaaaggcagcacggtgcaggtggtcaaccggagttgacaccagaagaagcagctgagcaggcagcagtaatgaggcaacagattcacctcttctggggtaatatgcttttcgagcgttcccaagtggagtttaagctcagtgttggtgactggaagacaaatcttgatgcatctgttgaaaggtttaagttggctggagcttcagaatcagatattttgacagtgttgaaaaatcacttttctaatgtagcctctgagtgtgaagagaagaaagtcatgacttcaggcacagaaatttcccaaacaaatgacaatgttgaggataagtgtgtggttgaaacc

SEQ ID NO: 1121 - DNA, 1521 bp, Artificial sequence; identical to SEQ ID NO: 1119
  MiR ressistant mutated nucleic acid sequence

SEQ ID NO: 1122 - DNA, 1521 bp, Artificial sequence
  MiR ressistant mutated nucleic acid sequence
atgacgcctccagttgcctctttgctaccggaaagagcggcaccacttataaataaaaaggttgtgacgagatggaggcctctcaagctggtgtatgaccacgacattaggcttgggcaggttccagagaaatgcagcttccgaacacttcgtgagtttgtagctaagaggttcccatcatccaaggcagtgttgattaaatataaagacgcagacggtgacttggtaaccatcacatcaacagaagagctccggttagctgaattattcattgataaagttggccacgaggttgtagaaaatgggagggaggatgacaataagctcccggtgttgaggctgcaccttgttgaagttagcccagaacaggaaccaactttgccattggaagaagagaagttggaggaggatgaggaattgttgatcaatggtgaagatagcactttacatgctttagcagtggtaaccgacgcagaggtggtgaagcaagatgttgagaacagatctgctgatcaaagtgtggagacagggaagaatgattgtggccatgccgagtgcaaggaagctgagattgatgattggttgcttcagtttgcagatttgttccggaaccaggttgggattgatgcagatgcacatttagacctgcatgagttgggcatggagctgtgctccgaggctctcgaggaaactgtgacaagcatggaggctcaggtcctttttgagttggctgcttctaaatttcaggaggttgctgctttggccttattcaattggggaaatgtgcacatgtgtgaagcaaggaagcgcatccctctcgatgaatctgctccaaaggaagtcatggctgctcagctccgcacagcttattattgggtgaaggagaggtatgctcttgcagggcacaaatatgaggaggcccttaaaatcaagccagacttccatgaagggcttcttgctttaggccagcaacacttcgagactgcaaagcttcattggtcatatgcactggcagataaggctgacctatctacctgggattctttggaaacattcaagctttttgatagcgctgagcagaacatgagggctgcaacagagatgtgggagaaggtggaagaacagagaatggcagagttaaaagaaccaggcgcatgtgataaggatggggtactgaggaaaaggcagcacggtgcaggtggtcaaccggagttgacaccagaagaagcagctgagcaggcagcagtaatgaggcaacagattcacctcttctggggtaatatgcttttcgagcgttcccaagtggagtttaagctcagtgttggtgactggaagacaaatcttgatgcatctgttgaaaggtttaagttggctggagcttcagaatcagatattttgacagtgttgaaaaatcacttttctaatgtagcctctgagtgtgaagagaagaaagtcatgacttcaggcacagaaatttcccaaacaaatgacaatgttgaggataagtgtgtggttgaaacc

SEQ ID NO: 1123 - DNA, 1521 bp, Artificial sequence; identical to SEQ ID NO: 1119
  MiR ressistant mutated nucleic acid sequence

SEQ ID NO: 1124 - DNA, 1521 bp, Artificial sequence
  MiR ressistant mutated nucleic acid sequence
atgacgcctccagttgcctctttgctaccggaaagagcggcaccacttataaataaaaaggttgtgacgagatggaggcctctcaagctggtgtatgaccacgacattaggcttgggcaggttccagagaaatgcagcttccgaacacttcgtgagtttgtagctaagaggttcccatcatccaaggcagtgttgattaaatataaagacgcagacggagacctagtaaccatcacatcaacagaagagctccggttagctgaattattcattgataaagttggccacgaggttgtagaaaatgggagggaggatgacaataagctcccggtgttgaggctgcaccttgttgaagttagcccagaacaggaaccaactttgccattggaagaagagaagttggaggaggatgaggaattgttgatcaatggtgaagatagcactttacatgctttagcagtggtaaccgacgcagaggtggtgaagcaagatgttgagaacagatctgctgatcaaagtgtggagacagggaagaatgattgtggccatgccgagtgcaaggaagctgagattgatgattggttgcttcagtttgcagatttgttccggaaccaggttgggattgatgcagatgcacatttagacctgcatgagttgggcatggagctgtgctccgaggctctcgaggaaactgtgacaagcatggaggctcaggtcctttttgagttggctgcttctaaatttcaggaggttgctgctttggccttattcaattggggaaatgtgcacatgtgtgaagcaaggaagcgcatccctctcgatgaatctgctccaaaggaagtcatggctgctcagctccgcacagcttattattgggtgaaggagaggtatgctcttgcagggcacaaatatgaggaggcccttaaaatcaagccagacttccatgaagggcttcttgctttaggccagcaacacttcgagactgcaaagcttcattggtcatatgcactggcagataaggctgacctatctacctgggattctttggaaacattcaagctttttgatagcgctgagcagaacatgagggctgcaacagagatgtgggagaaggtggaagaacagagaatggcagagttaaaagaaccaggcgcatgtgataaggatggggtactgaggaaaaggcagcacggtgcaggtggtcaaccggagttgacaccagaagaagcagctgagcaggcagcagtaatgaggcaacagattcacctcttctggggtaatatgcttttcgagcgttcccaagtggagtttaagctcagtgttggtgactggaagacaaatcttgatgcatctgttgaaaggtttaagttggctggagcttcagaatcagatattttgacagtgttgaaaaatcacttttctaatgtagcctctgagtgtgaagagaagaaagtcatgacttcaggcacagaaatttcccaaacaaatgacaatgttgaggataagtgtgtggttgaaacc

SEQ ID NO: 1125 - protein, 489 aa, Zea mays; identical to SEQ ID NO: 929

SEQ ID NO: 1126 - DNA, 1878 bp, Zea mays; identical to SEQ ID NO: 1023

SEQ ID NO: 1127 - DNA, 1467 bp, Zea mays
atggcgacacaggccgctttcctcgcagggttctcgcagctcgccgcgcagccgggccgcgaccgcgccgtggcggtggcggtggcgccggcgccgggcccggcccgggtggccgttgcggcggtgggtagcgccaagttgggcgtgaaggcggggacgtccaggaccgcggcggtggcgcgcctcggggtgcggtgccgggccagcctgatcgagcccgacggcgggcggctggtggacctggtggcgcccgaggagggcgggcggcgcgcggcgctgcggcgggaggcggcggagctgccgcaccggctgcgcttgggccgcgtcgacaaggaatgggtccacgtcctcagcgaagggtgggcgagcccgctgcaagggttcatgcgcgagcatgagttcctccaagcacttcatttcaatgccatccgcggccaggatggcaggatggtcaacatgtccgtccccatcgtgctctctgtcggggacgcacagcgaagggccatccaggccgacggcgccacgcgcgtcgcgctcgttgacgagcgcgaccgccccatcgccgtcctcagcgacattgagatctataagcataataaggaagaaagggtagcacggacatgggggacaactgcacctggattaccttatgtcgaggaggcaattaccaatgctggtgactggttggttggtggggacttggaggttatagaaccaatcaagtacaacgatggtctagatcagtatcgcctgtctccagcacagctgcgtgaagagtttgccaggcgcaatgctgatgcagtatttgcctttcagcttcgcaatcctgtacacaatgggcatgctcttcttatgaccgacacacgcaaacgtctccttgagatgggttataaaaaccctgttcttctgctccatccactgggaggattcacaaaagcagatgatgtgcctcttagttggagaatgaagcaacatgagaaggttcttgaggaaggtgtcctcaacccagaatcaactgttgttgcgatctttccctctccaatgcattatgctgggccaactgaggtgcagtggcatgctaaggctcgtattaatgctggtgcaaatttctatattgttggaagggatcctgctggtatgagccatcccacggagaaaagggacctctatgatgctgaccacgggaagaaggttttgagcatggctcctggcctcgagaggctcaacatccttcctttcaaggtggctgcatatgacacaaagcaaaagaaaatggatttcttcgatccatcaaggaaagatgatttcctcttcatctctggcacaaagatgcgcactcttgccaagaaccgcgagagtcccccggatggttttatgtgcccgggtggctggaaagtgctcgttgaatactatgacagcttggtgccatccgagggcagcagcaagctgcgcgagccagttgcagcc

SEQ ID NO: 1128 - DNA, 1467 bp, Artificial sequence
  MiR ressistant mutated nucleic acid sequence
atggcgacacaggccgctttcctcgcagggttctcgcagctcgccgcgcagccgggccgcgaccgcgccgtggcggtggcggtggcgccggcgccgggcccggcccgggtggccgttgcggcggtgggtagcgccaagttgggcgtgaaggcggggacgtccaggaccgcggcggtggcgcgcctcggggtgcggtgccgggccagcctgatcgagcccgacggcgggcggctggtggacctggtggcgcccgaggagggcgggcggcgcgcggcgctgcggcgggaggcggcggagctgccgcaccggctgcgcttgggccgcgtcgacaaggaatgggtccacgtcctcagcgaagggtgggcgagcccgctgcaagggttcatgcgcgagcatgaatttttacaggccttacacttcaatgccatccgcggccaggatggcaggatggtcaacatgtccgtccccatcgtgctctctgtcggggacgcacagcgaagggccatccaggccgacggcgccacgcgcgtcgcgctcgttgacgagcgcgaccgccccatcgccgtcctcagcgacattgagatctataagcataataaggaagaaagggtagcacggacatgggggacaactgcacctggattaccttatgtcgaggaggcaattaccaatgctggtgactggttggttggtggggacttggaggttatagaaccaatcaagtacaacgatggtctagatcagtatcgcctgtctccagcacagctgcgtgaagagtttgccaggcgcaatgctgatgcagtatttgcctttcagcttcgcaatcctgtacacaatgggcatgctcttcttatgaccgacacacgcaaacgtctccttgagatgggttataaaaaccctgttcttctgctccatccactgggaggattcacaaaagcagatgatgtgcctcttagttggagaatgaagcaacatgagaaggttcttgaggaaggtgtcctcaacccagaatcaactgttgttgcgatctttccctctccaatgcattatgctgggccaactgaggtgcagtggcatgctaaggctcgtattaatgctggtgcaaatttctatattgttggaagggatcctgctggtatgagccatcccacggagaaaagggacctctatgatgctgaccacgggaagaaggttttgagcatggctcctggcctcgagaggctcaacatccttcctttcaaggtggctgcatatgacacaaagcaaaagaaaatggatttcttcgatccatcaaggaaagatgatttcctcttcatctctggcacaaagatgcgcactcttgccaagaaccgcgagagtcccccggatggttttatgtgcccgggtggctggaaagtgctcgttgaatactatgacagcttggtgccatccgagggcagcagcaagctgcgcgagccagttgcagcc

SEQ ID NO: 1129 - DNA, 1467 bp, Artificial sequence
  MiR ressistant mutated nucleic acid sequence
atggcgacacaggccgctttcctcgcagggttctcgcagctcgccgcgcagccgggccgcgaccgcgccgtggcggtggcggtggcgccggcgccgggcccggcccgggtggccgttgcggcggtgggtagcgccaagttgggcgtgaaggcggggacgtccaggaccgcggcggtggcgcgcctcggggtgcggtgccgggccagcctgatcgagcccgacggcgggcggctggtggacctggtggcgcccgaggagggcgggcggcgcgcggcgctgcggcgggaggcggcggagctgccgcaccggctgcgcttgggccgcgtcgacaaggaatgggtccacgtcctcagcgaagggtgggcgagcccgctgcaagggttcatgcgcgagcatgagtttttacaggccttacacttcaatgccatccgcggccaggatggcaggatggtcaacatgtccgtccccatcgtgctctctgtcggggacgcacagcgaagggccatccaggccgacggcgccacgcgcgtcgcgctcgttgacgagcgcgaccgccccatcgccgtcctcagcgacattgagatctataagcataataaggaagaaagggtagcacggacatgggggacaactgcacctggattaccttatgtcgaggaggcaattaccaatgctggtgactggttggttggtggggacttggaggttatagaaccaatcaagtacaacgatggtctagatcagtatcgcctgtctccagcacagctgcgtgaagagtttgccaggcgcaatgctgatgcagtatttgcctttcagcttcgcaatcctgtacacaatgggcatgctcttcttatgaccgacacacgcaaacgtctccttgagatgggttataaaaaccctgttcttctgctccatccactgggaggattcacaaaagcagatgatgtgcctcttagttggagaatgaagcaacatgagaaggttcttgaggaaggtgtcctcaacccagaatcaactgttgttgcgatctttccctctccaatgcattatgctgggccaactgaggtgcagtggcatgctaaggctcgtattaatgctggtgcaaatttctatattgttggaagggatcctgctggtatgagccatcccacggagaaaagggacctctatgatgctgaccacgggaagaaggttttgagcatggctcctggcctcgagaggctcaacatccttcctttcaaggtggctgcatatgacacaaagcaaaagaaaatggatttcttcgatccatcaaggaaagatgatttcctcttcatctctggcacaaagatgcgcactcttgccaagaaccgcgagagtcccccggatggttttatgtgcccgggtggctggaaagtgctcgttgaatactatgacagcttggtgccatccgagggcagcagcaagctgcgcgagccagttgcagcc

SEQ ID NO: 1130 - DNA, 1467 bp, Artificial sequence
  MiR ressistant mutated nucleic acid sequence
atggcgacacaggccgctttcctcgcagggttctcgcagctcgccgcgcagccgggccgcgaccgcgccgtggcggtggcggtggcgccggcgccgggcccggcccgggtggccgttgcggcggtgggtagcgccaagttgggcgtgaaggcggggacgtccaggaccgcggcggtggcgcgcctcggggtgcggtgccgggccagcctgatcgagcccgacggcgggcggctggtggacctggtggcgcccgaggagggcgggcggcgcgcggcgctgcggcgggaggcggcggagctgccgcaccggctgcgcttgggccgcgtcgacaaggaatgggtccacgtcctcagcgaagggtgggcgagcccgctgcaagggttcatgcgcgagcatgaattcttacaggccttacacttcaatgccatccgcggccaggatggcaggatggtcaacatgtccgtccccatcgtgctctctgtcggggacgcacagcgaagggccatccaggccgacggcgccacgcgcgtcgcgctcgttgacgagcgcgaccgccccatcgccgtcctcagcgacattgagatctataagcataataaggaagaaagggtagcacggacatgggggacaactgcacctggattaccttatgtcgaggaggcaattaccaatgctggtgactggttggttggtggggacttggaggttatagaaccaatcaagtacaacgatggtctagatcagtatcgcctgtctccagcacagctgcgtgaagagtttgccaggcgcaatgctgatgcagtatttgcctttcagcttcgcaatcctgtacacaatgggcatgctcttcttatgaccgacacacgcaaacgtctccttgagatgggttataaaaaccctgttcttctgctccatccactgggaggattcacaaaagcagatgatgtgcctcttagttggagaatgaagcaacatgagaaggttcttgaggaaggtgtcctcaacccagaatcaactgttgttgcgatctttccctctccaatgcattatgctgggccaactgaggtgcagtggcatgctaaggctcgtattaatgctggtgcaaatttctatattgttggaagggatcctgctggtatgagccatcccacggagaaaagggacctctatgatgctgaccacgggaagaaggttttgagcatggctcctggcctcgagaggctcaacatccttcctttcaaggtggctgcatatgacacaaagcaaaagaaaatggatttcttcgatccatcaaggaaagatgatttcctcttcatctctggcacaaagatgcgcactcttgccaagaaccgcgagagtcccccggatggttttatgtgcccgggtggctggaaagtgctcgttgaatactatgacagcttggtgccatccgagggcagcagcaagctgcgcgagccagttgcagcc

SEQ ID NO: 1131 - DNA, 1467 bp, Artificial sequence
  MiR ressistant mutated nucleic acid sequence
atggcgacacaggccgctttcctcgcagggttctcgcagctcgccgcgcagccgggccgcgaccgcgccgtggcggtggcggtggcgccggcgccgggcccggcccgggtggccgttgcggcggtgggtagcgccaagttgggcgtgaaggcggggacgtccaggaccgcggcggtggcgcgcctcggggtgcggtgccgggccagcctgatcgagcccgacggcgggcggctggtggacctggtggcgcccgaggagggcgggcggcgcgcggcgctgcggcgggaggcggcggagctgccgcaccggctgcgcttgggccgcgtcgacaaggaatgggtccacgtcctcagcgaagggtgggcgagcccgctgcaagggttcatgcgcgagcatgaatttctccaggccctccacttcaatgccatccgcggccaggatggcaggatggtcaacatgtccgtccccatcgtgctctctgtcggggacgcacagcgaagggccatccaggccgacggcgccacgcgcgtcgcgctcgttgacgagcgcgaccgccccatcgccgtcctcagcgacattgagatctataagcataataaggaagaaagggtagcacggacatgggggacaactgcacctggattaccttatgtcgaggaggcaattaccaatgctggtgactggttggttggtggggacttggaggttatagaaccaatcaagtacaacgatggtctagatcagtatcgcctgtctccagcacagctgcgtgaagagtttgccaggcgcaatgctgatgcagtatttgcctttcagcttcgcaatcctgtacacaatgggcatgctcttcttatgaccgacacacgcaaacgtctccttgagatgggttataaaaaccctgttcttctgctccatccactgggaggattcacaaaagcagatgatgtgcctcttagttggagaatgaagcaacatgagaaggttcttgaggaaggtgtcctcaacccagaatcaactgttgttgcgatctttccctctccaatgcattatgctgggccaactgaggtgcagtggcatgctaaggctcgtattaatgctggtgcaaatttctatattgttggaagggatcctgctggtatgagccatcccacggagaaaagggacctctatgatgctgaccacgggaagaaggttttgagcatggctcctggcctcgagaggctcaacatccttcctttcaaggtggctgcatatgacacaaagcaaaagaaaatggatttcttcgatccatcaaggaaagatgatttcctcttcatctctggcacaaagatgcgcactcttgccaagaaccgcgagagtcccccggatggttttatgtgcccgggtggctggaaagtgctcgttgaatactatgacagcttggtgccatccgagggcagcagcaagctgcgcgagccagttgcagcc

SEQ ID NO: 1132 - DNA, 1467 bp, Artificial sequence
  MiR ressistant mutated nucleic acid sequence
atggcgacacaggccgctttcctcgcagggttctcgcagctcgccgcgcagccgggccgcgaccgcgccgtggcggtggcggtggcgccggcgccgggcccggcccgggtggccgttgcggcggtgggtagcgccaagttgggcgtgaaggcggggacgtccaggaccgcggcggtggcgcgcctcggggtgcggtgccgggccagcctgatcgagcccgacggcgggcggctggtggacctggtggcgcccgaggagggcgggcggcgcgcggcgctgcggcgggaggcggcggagctgccgcaccggctgcgcttgggccgcgtcgacaaggaatgggtccacgtcctcagcgaagggtgggcgagcccgctgcaagggttcatgcgcgagcatgaatttttacaagccttacacttcaatgccatccgcggccaggatggcaggatggtcaacatgtccgtccccatcgtgctctctgtcggggacgcacagcgaagggccatccaggccgacggcgccacgcgcgtcgcgctcgttgacgagcgcgaccgccccatcgccgtcctcagcgacattgagatctataagcataataaggaagaaagggtagcacggacatgggggacaactgcacctggattaccttatgtcgaggaggcaattaccaatgctggtgactggttggttggtggggacttggaggttatagaaccaatcaagtacaacgatggtctagatcagtatcgcctgtctccagcacagctgcgtgaagagtttgccaggcgcaatgctgatgcagtatttgcctttcagcttcgcaatcctgtacacaatgggcatgctcttcttatgaccgacacacgcaaacgtctccttgagatgggttataaaaaccctgttcttctgctccatccactgggaggattcacaaaagcagatgatgtgcctcttagttggagaatgaagcaacatgagaaggttcttgaggaaggtgtcctcaacccagaatcaactgttgttgcgatctttccctctccaatgcattatgctgggccaactgaggtgcagtggcatgctaaggctcgtattaatgctggtgcaaatttctatattgttggaagggatcctgctggtatgagccatcccacggagaaaagggacctctatgatgctgaccacgggaagaaggttttgagcatggctcctggcctcgagaggctcaacatccttcctttcaaggtggctgcatatgacacaaagcaaaagaaaatggatttcttcgatccatcaaggaaagatgatttcctcttcatctctggcacaaagatgcgcactcttgccaagaaccgcgagagtcccccggatggttttatgtgcccgggtggctggaaagtgctcgttgaatactatgacagcttggtgccatccgagggcagcagcaagctgcgcgagccagttgcagcc

SEQ ID NO: 1133 - DNA, 1467 bp, Artificial sequence
  MiR ressistant mutated nucleic acid sequence
atggcgacacaggccgctttcctcgcagggttctcgcagctcgccgcgcagccgggccgcgaccgcgccgtggcggtggcggtggcgccggcgccgggcccggcccgggtggccgttgcggcggtgggtagcgccaagttgggcgtgaaggcggggacgtccaggaccgcggcggtggcgcgcctcggggtgcggtgccgggccagcctgatcgagcccgacggcgggcggctggtggacctggtggcgcccgaggagggcgggcggcgcgcggcgctgcggcgggaggcggcggagctgccgcaccggctgcgcttgggccgcgtcgacaaggaatgggtccacgtcctcagcgaagggtgggcgagcccgctgcaagggttcatgcgcgagcatgaatttttacaggcattacacttcaatgccatccgcggccaggatggcaggatggtcaacatgtccgtccccatcgtgctctctgtcggggacgcacagcgaagggccatccaggccgacggcgccacgcgcgtcgcgctcgttgacgagcgcgaccgccccatcgccgtcctcagcgacattgagatctataagcataataaggaagaaagggtagcacggacatgggggacaactgcacctggattaccttatgtcgaggaggcaattaccaatgctggtgactggttggttggtggggacttggaggttatagaaccaatcaagtacaacgatggtctagatcagtatcgcctgtctccagcacagctgcgtgaagagtttgccaggcgcaatgctgatgcagtatttgcctttcagcttcgcaatcctgtacacaatgggcatgctcttcttatgaccgacacacgcaaacgtctccttgagatgggttataaaaaccctgttcttctgctccatccactgggaggattcacaaaagcagatgatgtgcctcttagttggagaatgaagcaacatgagaaggttcttgaggaaggtgtcctcaacccagaatcaactgttgttgcgatctttccctctccaatgcattatgctgggccaactgaggtgcagtggcatgctaaggctcgtattaatgctggtgcaaatttctatattgttggaagggatcctgctggtatgagccatcccacggagaaaagggacctctatgatgctgaccacgggaagaaggttttgagcatggctcctggcctcgagaggctcaacatccttcctttcaaggtggctgcatatgacacaaagcaaaagaaaatggatttcttcgatccatcaaggaaagatgatttcctcttcatctctggcacaaagatgcgcactcttgccaagaaccgcgagagtcccccggatggttttatgtgcccgggtggctggaaagtgctcgttgaatactatgacagcttggtgccatccgagggcagcagcaagctgcgcgagccagttgcagcc

SEQ ID NO: 1134 - DNA, 1467 bp, Artificial sequence
  MiR ressistant mutated nucleic acid sequence
atggcgacacaggccgctttcctcgcagggttctcgcagctcgccgcgcagccgggccgcgaccgcgccgtggcggtggcggtggcgccggcgccgggcccggcccgggtggccgttgcggcggtgggtagcgccaagttgggcgtgaaggcggggacgtccaggaccgcggcggtggcgcgcctcggggtgcggtgccgggccagcctgatcgagcccgacggcgggcggctggtggacctggtggcgcccgaggagggcgggcggcgcgcggcgctgcggcgggaggcggcggagctgccgcaccggctgcgcttgggccgcgtcgacaaggaatgggtccacgtcctcagcgaagggtgggcgagcccgctgcaagggttcatgcgcgagcatgaatttcttcaggcccttcacttcaatgccatccgcggccaggatggcaggatggtcaacatgtccgtccccatcgtgctctctgtcggggacgcacagcgaagggccatccaggccgacggcgccacgcgcgtcgcgctcgttgacgagcgcgaccgccccatcgccgtcctcagcgacattgagatctataagcataataaggaagaaagggtagcacggacatgggggacaactgcacctggattaccttatgtcgaggaggcaattaccaatgctggtgactggttggttggtggggacttggaggttatagaaccaatcaagtacaacgatggtctagatcagtatcgcctgtctccagcacagctgcgtgaagagtttgccaggcgcaatgctgatgcagtatttgcctttcagcttcgcaatcctgtacacaatgggcatgctcttcttatgaccgacacacgcaaacgtctccttgagatgggttataaaaaccctgttcttctgctccatccactgggaggattcacaaaagcagatgatgtgcctcttagttggagaatgaagcaacatgagaaggttcttgaggaaggtgtcctcaacccagaatcaactgttgttgcgatctttccctctccaatgcattatgctgggccaactgaggtgcagtggcatgctaaggctcgtattaatgctggtgcaaatttctatattgttggaagggatcctgctggtatgagccatcccacggagaaaagggacctctatgatgctgaccacgggaagaaggttttgagcatggctcctggcctcgagaggctcaacatccttcctttcaaggtggctgcatatgacacaaagcaaaagaaaatggatttcttcgatccatcaaggaaagatgatttcctcttcatctctggcacaaagatgcgcactcttgccaagaaccgcgagagtcccccggatggttttatgtgcccgggtggctggaaagtgctcgttgaatactatgacagcttggtgccatccgagggcagcagcaagctgcgcgagccagttgcagcc

SEQ ID NO: 1135 - protein, 325 aa, Zea mays; identical to SEQ ID NO: 971

SEQ ID NO: 1136 - DNA, 1283 bp, Zea mays; identical to SEQ ID NO: 1054

SEQ ID NO: 1137 - DNA, 975 bp, Zea mays
atggactgggcagcggcgtccgggtctccgtcgtggggcgcggcggcgacggaccccggtccgaccatgctgtccttcgcaggcccgtcctcctccgccgccgacgccgaggtgcggctccaggatttcgccgcgggtcttgcccagagctcgcggccgactggggcggcgccgggagccgggaggaggtcccgcgcggccgtgggaggtgccggcgcggaggcgtgctccgtcgacggctgccgctctgatctcagccggtgccgcgagtaccaccggcggcataaggtctgtgaggcacactccaaggcgccggtggtggtcgtcggcggacaggagcggcgcttctgccagcaatgcagccggtttcacatgctgtccgagtttgacgaggaaaaaagaagttgccggaagcgtctggatggccataataggcgtcgaagaaagccacagcatgatctgacaaatctagggggtttctttccataccaccaagtgaatcagtttgagttctacccacaaacaattccaacagttggccagaattcggacgccgtgcacttggtgggccgtcagcagcctttctccatatcgttctcaagaacaccagacgagttccctttcccacagggtggcggtagcagtgtgctgcaccacctccatgcagcccgccctggccatcacgctgaaggcagcagccacactggaagcagcacacgcgacaacgctctctccggcacactgggccccgagtgtgctctctctcttctgtcatcgtcgctgcgtcgcccctcaactgctggcgtccccgccgttggccaaccccaggttactgcctcttcgaccactgccgtgtcgcaggctgcaacggcagctgtggccactgctgcattcgcggccagtgctggccaccatgtgtttgttcctgatgctatgtttgaggatccatcacaggcactgccattctcttggcag

SEQ ID NO: 1138 - DNA, 975 bp, Artificial sequence
  MiR ressistant mutated nucleic acid sequence
atggactgggcagcggcgtccgggtctccgtcgtggggcgcggcggcgacggaccccggtccgaccatgctgtccttcgcaggcccgtcctcctccgccgccgacgccgaggtgcggctccaggatttcgccgcgggtcttgcccagagctcgcggccgactggggcggcgccgggagccgggaggaggtcccgcgcggccgtgggaggtgccggcgcggaggcgtgctccgtcgacggctgccgctctgatctcagccggtgccgcgagtaccaccggcggcataaggtctgtgaggcacactccaaggcgccggtggtggtcgtcggcggacaggagcggcgcttctgccagcaatgcagccggtttcacatgctgtccgagtttgacgaggaaaaaagaagttgccggaagcgtctggatggccataataggcgtcgaagaaagccacagcatgatctgacaaatctagggggtttctttccataccaccaagtgaatcagtttgagttctacccacaaacaattccaacagttggccagaattcggacgccgtgcacttggtgggccgtcagcagcctttctccatatcgttctcaagaacaccagacgagttccctttcccacagggtggcggtagcagtgtgctgcaccacctccatgcagcccgccctggccatcacgctgaaggcagcagccacactggaagcagcacacgcgacaacgctctctccggcacactgggcccagaatgcgcattaagcttattatcatcgtcgctgcgtcgcccctcaactgctggcgtccccgccgttggccaaccccaggttactgcctcttcgaccactgccgtgtcgcaggctgcaacggcagctgtggccactgctgcattcgcggccagtgctggccaccatgtgtttgttcctgatgctatgtttgaggatccatcacaggcactgccattctcttggcag

SEQ ID NO: 1139 - DNA, 975 bp, Artificial sequence
  MiR ressistant mutated nucleic acid sequence
atggactgggcagcggcgtccgggtctccgtcgtggggcgcggcggcgacggaccccggtccgaccatgctgtccttcgcaggcccgtcctcctccgccgccgacgccgaggtgcggctccaggatttcgccgcgggtcttgcccagagctcgcggccgactggggcggcgccgggagccgggaggaggtcccgcgcggccgtgggaggtgccggcgcggaggcgtgctccgtcgacggctgccgctctgatctcagccggtgccgcgagtaccaccggcggcataaggtctgtgaggcacactccaaggcgccggtggtggtcgtcggcggacaggagcggcgcttctgccagcaatgcagccggtttcacatgctgtccgagtttgacgaggaaaaaagaagttgccggaagcgtctggatggccataataggcgtcgaagaaagccacagcatgatctgacaaatctagggggtttctttccataccaccaagtgaatcagtttgagttctacccacaaacaattccaacagttggccagaattcggacgccgtgcacttggtgggccgtcagcagcctttctccatatcgttctcaagaacaccagacgagttccctttcccacagggtggcggtagcagtgtgctgcaccacctccatgcagcccgccctggccatcacgctgaaggcagcagccacactggaagcagcacacgcgacaacgctctctccggcacactgggccccgaatgcgcattaagcttattatcatcgtcgctgcgtcgcccctcaactgctggcgtccccgccgttggccaaccccaggttactgcctcttcgaccactgccgtgtcgcaggctgcaacggcagctgtggccactgctgcattcgcggccagtgctggccaccatgtgtttgttcctgatgctatgtttgaggatccatcacaggcactgccattctcttggcag

SEQ ID NO: 1140 - DNA, 975 bp, Artificial sequence; identical to SEQ ID NO: 1139
  MiR ressistant mutated nucleic acid sequence

SEQ ID NO: 1141 - DNA, 975 bp, Artificial sequence; identical to SEQ ID NO: 1139
  MiR ressistant mutated nucleic acid sequence

SEQ ID NO: 1142 - DNA, 975 bp, Artificial sequence
  MiR ressistant mutated nucleic acid sequence
atggactgggcagcggcgtccgggtctccgtcgtggggcgcggcggcgacggaccccggtccgaccatgctgtccttcgcaggcccgtcctcctccgccgccgacgccgaggtgcggctccaggatttcgccgcgggtcttgcccagagctcgcggccgactggggcggcgccgggagccgggaggaggtcccgcgcggccgtgggaggtgccggcgcggaggcgtgctccgtcgacggctgccgctctgatctcagccggtgccgcgagtaccaccggcggcataaggtctgtgaggcacactccaaggcgccggtggtggtcgtcggcggacaggagcggcgcttctgccagcaatgcagccggtttcacatgctgtccgagtttgacgaggaaaaaagaagttgccggaagcgtctggatggccataataggcgtcgaagaaagccacagcatgatctgacaaatctagggggtttctttccataccaccaagtgaatcagtttgagttctacccacaaacaattccaacagttggccagaattcggacgccgtgcacttggtgggccgtcagcagcctttctccatatcgttctcaagaacaccagacgagttccctttcccacagggtggcggtagcagtgtgctgcaccacctccatgcagcccgccctggccatcacgctgaaggcagcagccacactggaagcagcacacgcgacaacgctctctccggcacactgggcccagagtgcgcattaagcttattatcatcgtcgctgcgtcgcccctcaactgctggcgtccccgccgttggccaaccccaggttactgcctcttcgaccactgccgtgtcgcaggctgcaacggcagctgtggccactgctgcattcgcggccagtgctggccaccatgtgtttgttcctgatgctatgtttgaggatccatcacaggcactgccattctcttggcag

SEQ ID NO: 1143 - DNA, 975 bp, Artificial sequence; identical to SEQ ID NO: 1142
  MiR ressistant mutated nucleic acid sequence

SEQ ID NO: 1144 - DNA, 975 bp, Artificial sequence; identical to SEQ ID NO: 1142
  MiR ressistant mutated nucleic acid sequence

SEQ ID NO: 1145 - DNA, 975 bp, Artificial sequence
  MiR ressistant mutated nucleic acid sequence
atggactgggcagcggcgtccgggtctccgtcgtggggcgcggcggcgacggaccccggtccgaccatgctgtccttcgcaggcccgtcctcctccgccgccgacgccgaggtgcggctccaggatttcgccgcgggtcttgcccagagctcgcggccgactggggcggcgccgggagccgggaggaggtcccgcgcggccgtgggaggtgccggcgcggaggcgtgctccgtcgacggctgccgctctgatctcagccggtgccgcgagtaccaccggcggcataaggtctgtgaggcacactccaaggcgccggtggtggtcgtcggcggacaggagcggcgcttctgccagcaatgcagccggtttcacatgctgtccgagtttgacgaggaaaaaagaagttgccggaagcgtctggatggccataataggcgtcgaagaaagccacagcatgatctgacaaatctagggggtttctttccataccaccaagtgaatcagtttgagttctacccacaaacaattccaacagttggccagaattcggacgccgtgcacttggtgggccgtcagcagcctttctccatatcgttctcaagaacaccagacgagttccctttcccacagggtggcggtagcagtgtgctgcaccacctccatgcagcccgccctggccatcacgctgaaggcagcagccacactggaagcagcacacgcgacaacgctctctccggcacactgggcccagaatgtgcattaagcttattatcatcgtcgctgcgtcgcccctcaactgctggcgtccccgccgttggccaaccccaggttactgcctcttcgaccactgccgtgtcgcaggctgcaacggcagctgtggccactgctgcattcgcggccagtgctggccaccatgtgtttgttcctgatgctatgtttgaggatccatcacaggcactgccattctcttggcag

SEQ ID NO: 1146 - DNA, 975 bp, Artificial sequence; identical to SEQ ID NO: 1145
  MiR ressistant mutated nucleic acid sequence

SEQ ID NO: 1147 - DNA, 975 bp, Artificial sequence; identical to SEQ ID NO: 1145
  MiR ressistant mutated nucleic acid sequence

SEQ ID NO: 1148 - protein, 378 aa, Zea mays; identical to SEQ ID NO: 977

SEQ ID NO: 1149 - DNA, 1590 bp, Zea mays; identical to SEQ ID NO: 1058

SEQ ID NO: 1150 - DNA, 1134 bp, Zea mays
atggcgaccggcggcggcagcagcaggagcgacgacgtgcgcgggctcaagtttggcaagaagatctacttcgagcaggacggcgggagcgggagcggggcgggggcggtgggcggcaggaaggggaagggcgtggccaccggtggcgcgaggccggcgtccgccgcctccgcagcccagccgccgaggtgccaggtggacgggtgcggcgtggatctgagcgccgtcaagcagtactactgccggcacaaggtgtgcaacatgcactccaaggagccgcgcgtcttcgtcgccggcatcgagcagcgcttctgccaacagtgcagcaggttccaccagctacatgaatttgaccaagggaaacgtagctgccgccgccgcctcatcggtcacaacgagcgccggaggaagccaccacctggacctctcacttcacgatatggccggctcgctgcatcacttcaagagcctggcaggttcagaagcttcctgctcgacttctcgtacccaagggttccaagcagcgtgagggatgcgtggccaggaatccagcacggtggcgacaggatgctgggcaccgtccagtggcatgggcaccaagaacctcctcacccacaccgcagtgcagctgctggctatggcaaccatgctgcatacaactgccatggcggcttggtagcaggcggggccccaatgctctcctctgccgcctttgagctcccgcctggcggatgtgtcgcgggagttgccgccgactccagctgtgctctctctcttctgtcaactcagccatgggacacgacctcccacgaccaccggtccccagcaatgcccgcggccggcgccttcgacggcaccccggtggcgccgtccgtcatggcgagcagctacgcggcgtcgagcgcctggacgggctcgcgggaccccgctgccgacggcgccaggaacgcgcagcgtctcgacgatgctctgcacctggtccacccaggctccgcggcggtccacttctccggcgagctcgagctcgccctgcagggaagcggcgggccgccacacctgccgcgcgtcgaccatggcggctccggcggcggcaccttcaaccattccaccaccagcgcgatgaactggtccctg

SEQ ID NO: 1151 - DNA, 1134 bp, Artificial sequence
  MiR ressistant mutated nucleic acid sequence
atggcgaccggcggcggcagcagcaggagcgacgacgtgcgcgggctcaagtttggcaagaagatctacttcgagcaggacggcgggagcgggagcggggcgggggcggtgggcggcaggaaggggaagggcgtggccaccggtggcgcgaggccggcgtccgccgcctccgcagcccagccgccgaggtgccaggtggacgggtgcggcgtggatctgagcgccgtcaagcagtactactgccggcacaaggtgtgcaacatgcactccaaggagccgcgcgtcttcgtcgccggcatcgagcagcgcttctgccaacagtgcagcaggttccaccagctacatgaatttgaccaagggaaacgtagctgccgccgccgcctcatcggtcacaacgagcgccggaggaagccaccacctggacctctcacttcacgatatggccggctcgctgcatcacttcaagagcctggcaggttcagaagcttcctgctcgacttctcgtacccaagggttccaagcagcgtgagggatgcgtggccaggaatccagcacggtggcgacaggatgctgggcaccgtccagtggcatgggcaccaagaacctcctcacccacaccgcagtgcagctgctggctatggcaaccatgctgcatacaactgccatggcggcttggtagcaggcggggccccaatgctctcctctgccgcctttgagctcccgcctggcggatgtgtcgcgggagttgccgccgacagttcatgcgcattaagcttattatcaactcagccatgggacacgacctcccacgaccaccggtccccagcaatgcccgcggccggcgccttcgacggcaccccggtggcgccgtccgtcatggcgagcagctacgcggcgtcgagcgcctggacgggctcgcgggaccccgctgccgacggcgccaggaacgcgcagcgtctcgacgatgctctgcacctggtccacccaggctccgcggcggtccacttctccggcgagctcgagctcgccctgcagggaagcggcgggccgccacacctgccgcgcgtcgaccatggcggctccggcggcggcaccttcaaccattccaccaccagcgcgatgaactggtccctg

SEQ ID NO: 1152 - DNA, 1134 bp, Artificial sequence
  MiR ressistant mutated nucleic acid sequence
atggcgaccggcggcggcagcagcaggagcgacgacgtgcgcgggctcaagtttggcaagaagatctacttcgagcaggacggcgggagcgggagcggggcgggggcggtgggcggcaggaaggggaagggcgtggccaccggtggcgcgaggccggcgtccgccgcctccgcagcccagccgccgaggtgccaggtggacgggtgcggcgtggatctgagcgccgtcaagcagtactactgccggcacaaggtgtgcaacatgcactccaaggagccgcgcgtcttcgtcgccggcatcgagcagcgcttctgccaacagtgcagcaggttccaccagctacatgaatttgaccaagggaaacgtagctgccgccgccgcctcatcggtcacaacgagcgccggaggaagccaccacctggacctctcacttcacgatatggccggctcgctgcatcacttcaagagcctggcaggttcagaagcttcctgctcgacttctcgtacccaagggttccaagcagcgtgagggatgcgtggccaggaatccagcacggtggcgacaggatgctgggcaccgtccagtggcatgggcaccaagaacctcctcacccacaccgcagtgcagctgctggctatggcaaccatgctgcatacaactgccatggcggcttggtagcaggcggggccccaatgctctcctctgccgcctttgagctcccgcctggcggatgtgtcgcgggagttgccgccgactcctcatgcgcattaagcttattatcaactcagccatgggacacgacctcccacgaccaccggtccccagcaatgcccgcggccggcgccttcgacggcaccccggtggcgccgtccgtcatggcgagcagctacgcggcgtcgagcgcctggacgggctcgcgggaccccgctgccgacggcgccaggaacgcgcagcgtctcgacgatgctctgcacctggtccacccaggctccgcggcggtccacttctccggcgagctcgagctcgccctgcagggaagcggcgggccgccacacctgccgcgcgtcgaccatggcggctccggcggcggcaccttcaaccattccaccaccagcgcgatgaactggtccctg

SEQ ID NO: 1153 - DNA, 1134 bp, Artificial sequence; identical to SEQ ID NO: 1152
  MiR ressistant mutated nucleic acid sequence

SEQ ID NO: 1154 - DNA, 1134 bp, Artificial sequence; identical to SEQ ID NO: 1152
  MiR ressistant mutated nucleic acid sequence

SEQ ID NO: 1155 - DNA, 1134 bp, Artificial sequence; identical to SEQ ID NO: 1152
  MiR ressistant mutated nucleic acid sequence

SEQ ID NO: 1156 - DNA, 1134 bp, Artificial sequence; identical to SEQ ID NO: 1152
  MiR ressistant mutated nucleic acid sequence

SEQ ID NO: 1157 - DNA, 1134 bp, Artificial sequence
  MiR ressistant mutated nucleic acid sequence
atggcgaccggcggcggcagcagcaggagcgacgacgtgcgcgggctcaagtttggcaagaagatctacttcgagcaggacggcgggagcgggagcggggcgggggcggtgggcggcaggaaggggaagggcgtggccaccggtggcgcgaggccggcgtccgccgcctccgcagcccagccgccgaggtgccaggtggacgggtgcggcgtggatctgagcgccgtcaagcagtactactgccggcacaaggtgtgcaacatgcactccaaggagccgcgcgtcttcgtcgccggcatcgagcagcgcttctgccaacagtgcagcaggttccaccagctacatgaatttgaccaagggaaacgtagctgccgccgccgcctcatcggtcacaacgagcgccggaggaagccaccacctggacctctcacttcacgatatggccggctcgctgcatcacttcaagagcctggcaggttcagaagcttcctgctcgacttctcgtacccaagggttccaagcagcgtgagggatgcgtggccaggaatccagcacggtggcgacaggatgctgggcaccgtccagtggcatgggcaccaagaacctcctcacccacaccgcagtgcagctgctggctatggcaaccatgctgcatacaactgccatggcggcttggtagcaggcggggccccaatgctctcctctgccgcctttgagctcccgcctggcggatgtgtcgcgggagttgccgccgacagtagctgcgcattaagcttattatcaactcagccatgggacacgacctcccacgaccaccggtccccagcaatgcccgcggccggcgccttcgacggcaccccggtggcgccgtccgtcatggcgagcagctacgcggcgtcgagcgcctggacgggctcgcgggaccccgctgccgacggcgccaggaacgcgcagcgtctcgacgatgctctgcacctggtccacccaggctccgcggcggtccacttctccggcgagctcgagctcgccctgcagggaagcggcgggccgccacacctgccgcgcgtcgaccatggcggctccggcggcggcaccttcaaccattccaccaccagcgcgatgaactggtccctg

SEQ ID NO: 1158 - DNA, 1134 bp, Artificial sequence; identical to SEQ ID NO: 1157
  MiR ressistant mutated nucleic acid sequence

SEQ ID NO: 1159 - DNA, 1134 bp, Artificial sequence; identical to SEQ ID NO: 1157
  MiR ressistant mutated nucleic acid sequence

SEQ ID NO: 1160 - DNA, 1134 bp, Artificial sequence; identical to SEQ ID NO: 1157
  MiR ressistant mutated nucleic acid sequence

SEQ ID NO: 1161 - protein, 439 aa, Zea mays; identical to SEQ ID NO: 981

SEQ ID NO: 1162 - DNA, 1827 bp, Zea mays; identical to SEQ ID NO: 1061

SEQ ID NO: 1163 - DNA, 1317 bp, Zea mays
atgggttcttttgggatgaactggaatcagaaggaccccatggtgtgggattgggaacatctagtaccgtctgtctcaaatgcagttacaaggcacggatctgctaattcatctggtggtactcttacttctaactcagagctagggcatggttcatccaagagctctatttcagcgtccattgattcaccctctggagtagggaacagcttagagttcaacttcgccgctgttgagaggcatgttaagaacacgggcacgaacggcagagtcgatgactcggggaattctccatcgtcaatgatagctttcaaccaaggagagccattaatcagcctgaaacttgggaagagggcttacttcgaaaacgcctgcggaggacaggatgccaaggtttctgcagcttcagacgttacttctgcagccagcgtggtcaagaagactaaggtgtctcagcagaatgcaaagaactggtactgtcaggttgaagggtgcaaagttgacctgtcttctgctaaagattacaatcgcaagcacaaggtctgtgtagtccattctaaagctaccaaggtggttgttgctggtctagagcgtcggttttgtcaacagtgtagccgttttcatggtttagcggagtttgatcagaacaaacgaagctgtcgtaggcgtctgatgcatcataatgcacggaggaggaaacctcaggcagacacaatttcattcaattcatcgacaatgttttatgatacaaggcagcggacaaatcttttctttagtcaaccactttatggccaagtgaggagcaatgcagggtcttcatgggataacttgggaggcttaaaattcatggagacgaaacatccgccagtgcatccaacaaaaacagcatcccctgatgaactgcatttctcagccctccagataactagtgctgcggctcacaccggacatcatcatgatctcgatgggttcatggcgttcaagggaaccagcacaaaggtccttaaccaaggcgtggaggcttgggcggccgcttccagctcgaacaacggaggcccagaaggtgggcgtgctctctctcttctgtcagacggctcgtggggctcgagttcagccgtcatccagcagcccacatctcacgcggacgccggtgcattgctgccgcccctcgccaccgttgccgtctccaacgccgccgccgccgccgggcatcctctggacccgtccccgggaaggttctggccgcaagacgatcatcccccgctcgtcgacggacccgccacgcagattccggagctggcgcacctccggatatgg

SEQ ID NO: 1164 - DNA, 1317 bp, Artificial sequence
  MiR ressistant mutated nucleic acid sequence
atgggttcttttgggatgaactggaatcagaaggaccccatggtgtgggattgggaacatctagtaccgtctgtctcaaatgcagttacaaggcacggatctgctaattcatctggtggtactcttacttctaactcagagctagggcatggttcatccaagagctctatttcagcgtccattgattcaccctctggagtagggaacagcttagagttcaacttcgccgctgttgagaggcatgttaagaacacgggcacgaacggcagagtcgatgactcggggaattctccatcgtcaatgatagctttcaaccaaggagagccattaatcagcctgaaacttgggaagagggcttacttcgaaaacgcctgcggaggacaggatgccaaggtttctgcagcttcagacgttacttctgcagccagcgtggtcaagaagactaaggtgtctcagcagaatgcaaagaactggtactgtcaggttgaagggtgcaaagttgacctgtcttctgctaaagattacaatcgcaagcacaaggtctgtgtagtccattctaaagctaccaaggtggttgttgctggtctagagcgtcggttttgtcaacagtgtagccgttttcatggtttagcggagtttgatcagaacaaacgaagctgtcgtaggcgtctgatgcatcataatgcacggaggaggaaacctcaggcagacacaatttcattcaattcatcgacaatgttttatgatacaaggcagcggacaaatcttttctttagtcaaccactttatggccaagtgaggagcaatgcagggtcttcatgggataacttgggaggcttaaaattcatggagacgaaacatccgccagtgcatccaacaaaaacagcatcccctgatgaactgcatttctcagccctccagataactagtgctgcggctcacaccggacatcatcatgatctcgatgggttcatggcgttcaagggaaccagcacaaaggtccttaaccaaggcgtggaggcttgggcggccgcttccagctcgaacaacggaggcccagaaggaggaagagcattaagcttattatcagacggctcgtggggctcgagttcagccgtcatccagcagcccacatctcacgcggacgccggtgcattgctgccgcccctcgccaccgttgccgtctccaacgccgccgccgccgccgggcatcctctggacccgtccccgggaaggttctggccgcaagacgatcatcccccgctcgtcgacggacccgccacgcagattccggagctggcgcacctccggatatgg

SEQ ID NO: 1165 - DNA, 1317 bp, Artificial sequence
  MiR ressistant mutated nucleic acid sequence
atgggttcttttgggatgaactggaatcagaaggaccccatggtgtgggattgggaacatctagtaccgtctgtctcaaatgcagttacaaggcacggatctgctaattcatctggtggtactcttacttctaactcagagctagggcatggttcatccaagagctctatttcagcgtccattgattcaccctctggagtagggaacagcttagagttcaacttcgccgctgttgagaggcatgttaagaacacgggcacgaacggcagagtcgatgactcggggaattctccatcgtcaatgatagctttcaaccaaggagagccattaatcagcctgaaacttgggaagagggcttacttcgaaaacgcctgcggaggacaggatgccaaggtttctgcagcttcagacgttacttctgcagccagcgtggtcaagaagactaaggtgtctcagcagaatgcaaagaactggtactgtcaggttgaagggtgcaaagttgacctgtcttctgctaaagattacaatcgcaagcacaaggtctgtgtagtccattctaaagctaccaaggtggttgttgctggtctagagcgtcggttttgtcaacagtgtagccgttttcatggtttagcggagtttgatcagaacaaacgaagctgtcgtaggcgtctgatgcatcataatgcacggaggaggaaacctcaggcagacacaatttcattcaattcatcgacaatgttttatgatacaaggcagcggacaaatcttttctttagtcaaccactttatggccaagtgaggagcaatgcagggtcttcatgggataacttgggaggcttaaaattcatggagacgaaacatccgccagtgcatccaacaaaaacagcatcccctgatgaactgcatttctcagccctccagataactagtgctgcggctcacaccggacatcatcatgatctcgatgggttcatggcgttcaagggaaccagcacaaaggtccttaaccaaggcgtggaggcttgggcggccgcttccagctcgaacaacggaggcccagaaggtggtagagcattaagcttattatcagacggctcgtggggctcgagttcagccgtcatccagcagcccacatctcacgcggacgccggtgcattgctgccgcccctcgccaccgttgccgtctccaacgccgccgccgccgccgggcatcctctggacccgtccccgggaaggttctggccgcaagacgatcatcccccgctcgtcgacggacccgccacgcagattccggagctggcgcacctccggatatgg

SEQ ID NO: 1166 - DNA, 1317 bp, Artificial sequence; identical to SEQ ID NO: 1165
  MiR ressistant mutated nucleic acid sequence

SEQ ID NO: 1167 - DNA, 1317 bp, Artificial sequence; identical to SEQ ID NO: 1165
  MiR ressistant mutated nucleic acid sequence

SEQ ID NO: 1168 - DNA, 1317 bp, Artificial sequence
  MiR ressistant mutated nucleic acid sequence
atgggttcttttgggatgaactggaatcagaaggaccccatggtgtgggattgggaacatctagtaccgtctgtctcaaatgcagttacaaggcacggatctgctaattcatctggtggtactcttacttctaactcagagctagggcatggttcatccaagagctctatttcagcgtccattgattcaccctctggagtagggaacagcttagagttcaacttcgccgctgttgagaggcatgttaagaacacgggcacgaacggcagagtcgatgactcggggaattctccatcgtcaatgatagctttcaaccaaggagagccattaatcagcctgaaacttgggaagagggcttacttcgaaaacgcctgcggaggacaggatgccaaggtttctgcagcttcagacgttacttctgcagccagcgtggtcaagaagactaaggtgtctcagcagaatgcaaagaactggtactgtcaggttgaagggtgcaaagttgacctgtcttctgctaaagattacaatcgcaagcacaaggtctgtgtagtccattctaaagctaccaaggtggttgttgctggtctagagcgtcggttttgtcaacagtgtagccgttttcatggtttagcggagtttgatcagaacaaacgaagctgtcgtaggcgtctgatgcatcataatgcacggaggaggaaacctcaggcagacacaatttcattcaattcatcgacaatgttttatgatacaaggcagcggacaaatcttttctttagtcaaccactttatggccaagtgaggagcaatgcagggtcttcatgggataacttgggaggcttaaaattcatggagacgaaacatccgccagtgcatccaacaaaaacagcatcccctgatgaactgcatttctcagccctccagataactagtgctgcggctcacaccggacatcatcatgatctcgatgggttcatggcgttcaagggaaccagcacaaaggtccttaaccaaggcgtggaggcttgggcggccgcttccagctcgaacaacggaggcccagaaggggggagagcattaagcttattatcagacggctcgtggggctcgagttcagccgtcatccagcagcccacatctcacgcggacgccggtgcattgctgccgcccctcgccaccgttgccgtctccaacgccgccgccgccgccgggcatcctctggacccgtccccgggaaggttctggccgcaagacgatcatcccccgctcgtcgacggacccgccacgcagattccggagctggcgcacctccggatatgg

SEQ ID NO: 1169 - DNA, 1317 bp, Artificial sequence; identical to SEQ ID NO: 1168
  MiR ressistant mutated nucleic acid sequence

SEQ ID NO: 1170 - DNA, 1317 bp, Artificial sequence; identical to SEQ ID NO: 1168
  MiR ressistant mutated nucleic acid sequence

SEQ ID NO: 1171 - DNA, 1317 bp, Artificial sequence
  MiR ressistant mutated nucleic acid sequence
atgggttcttttgggatgaactggaatcagaaggaccccatggtgtgggattgggaacatctagtaccgtctgtctcaaatgcagttacaaggcacggatctgctaattcatctggtggtactcttacttctaactcagagctagggcatggttcatccaagagctctatttcagcgtccattgattcaccctctggagtagggaacagcttagagttcaacttcgccgctgttgagaggcatgttaagaacacgggcacgaacggcagagtcgatgactcggggaattctccatcgtcaatgatagctttcaaccaaggagagccattaatcagcctgaaacttgggaagagggcttacttcgaaaacgcctgcggaggacaggatgccaaggtttctgcagcttcagacgttacttctgcagccagcgtggtcaagaagactaaggtgtctcagcagaatgcaaagaactggtactgtcaggttgaagggtgcaaagttgacctgtcttctgctaaagattacaatcgcaagcacaaggtctgtgtagtccattctaaagctaccaaggtggttgttgctggtctagagcgtcggttttgtcaacagtgtagccgttttcatggtttagcggagtttgatcagaacaaacgaagctgtcgtaggcgtctgatgcatcataatgcacggaggaggaaacctcaggcagacacaatttcattcaattcatcgacaatgttttatgatacaaggcagcggacaaatcttttctttagtcaaccactttatggccaagtgaggagcaatgcagggtcttcatgggataacttgggaggcttaaaattcatggagacgaaacatccgccagtgcatccaacaaaaacagcatcccctgatgaactgcatttctcagccctccagataactagtgctgcggctcacaccggacatcatcatgatctcgatgggttcatggcgttcaagggaaccagcacaaaggtccttaaccaaggcgtggaggcttgggcggccgcttccagctcgaacaacggaggcccagaaggaggacgtgcattaagcttattatcagacggctcgtggggctcgagttcagccgtcatccagcagcccacatctcacgcggacgccggtgcattgctgccgcccctcgccaccgttgccgtctccaacgccgccgccgccgccgggcatcctctggacccgtccccgggaaggttctggccgcaagacgatcatcccccgctcgtcgacggacccgccacgcagattccggagctggcgcacctccggatatgg

SEQ ID NO: 1172 - DNA, 1317 bp, Artificial sequence; identical to SEQ ID NO: 1171
  MiR ressistant mutated nucleic acid sequence

SEQ ID NO: 1173 - DNA, 1317 bp, Artificial sequence; identical to SEQ ID NO: 1171
  MiR ressistant mutated nucleic acid sequence

SEQ ID NO: 1174 - protein, 383 aa, Zea mays; identical to SEQ ID NO: 980

SEQ ID NO: 1175 - DNA, 1616 bp, Zea mays; identical to SEQ ID NO: 1060

SEQ ID NO: 1176 - DNA, 1149 bp, Zea mays
atggcgaccggcggcggcggtgggagcgacgacttccacgggctcacgttcggccagaagatctacttcgagcaggacgcgggcgccgccggggggagcgcgacgggcggcaggaaggggaagggcgccgcggcgtccgcgagcgccgcccagccgccgcggtgccgggtggacgggtgcggcgtggatctgagcgccgtcaagcagtactactgccggcacaaggtgtgctacatgcactccaaggagccgcgcgtcttcgtcgccggcatcgagcagcgcttctgccagcagtgcagcaggttccaccagttacctgaatttgaccaagggaaacgaagctgccgccgccgcctcattggtcacaacgagcgccggaggaagccaccacctggaccactcacctcacgatacggcccgcttgctgcatcactagttcaagagcctggtaggttcaggagcttcctgctcgacttctcgtacccgagggttccaagcagcgtgagagatgatgcgtggcaatggcaagggatgcagcatggcggcgacaggatgctgctgggtaccgccagcgccatccagtggcatgggaaccaagaacctcacccaccacatcgcagcgcagctgcgggctatggcaaccatgcgtacaacaactgccatggtggcggcggcttggtagcagcagcagcgggggcgtcaatgctctcctctgccttcgagcccccgcctggcggtggcggatgtgtcgcaggagctaccgcggccgactccagctgtgctctctctcttctgtcaactcagccatgggatacgcccacccaaagtggcagcagccaccacaaccggtccccagcgatgtccgcggctgcaggcgccttcgaagtggcgccgtcgtccgtcgtggcgagcagctacacggcgtcgagctcctggtctggctcacgggaccctgccgacggcgccaggaaaaacgcgcagcgtcacgatgatggcctgcacctggtccatccaccaggccccgtccaccacggccacttctccggcgagctcgagctcgccctgcagggaagcggcccgccgcatgtcgaccatggcggcggcacctgcttcagccattctgacaccaacgcgatgaattggtccctg

SEQ ID NO: 1177 - DNA, 1149 bp, Artificial sequence
  MiR ressistant mutated nucleic acid sequence
atggcgaccggcggcggcggtgggagcgacgacttccacgggctcacgttcggccagaagatctacttcgagcaggacgcgggcgccgccggggggagcgcgacgggcggcaggaaggggaagggcgccgcggcgtccgcgagcgccgcccagccgccgcggtgccgggtggacgggtgcggcgtggatctgagcgccgtcaagcagtactactgccggcacaaggtgtgctacatgcactccaaggagccgcgcgtcttcgtcgccggcatcgagcagcgcttctgccagcagtgcagcaggttccaccagttacctgaatttgaccaagggaaacgaagctgccgccgccgcctcattggtcacaacgagcgccggaggaagccaccacctggaccactcacctcacgatacggcccgcttgctgcatcactagttcaagagcctggtaggttcaggagcttcctgctcgacttctcgtacccgagggttccaagcagcgtgagagatgatgcgtggcaatggcaagggatgcagcatggcggcgacaggatgctgctgggtaccgccagcgccatccagtggcatgggaaccaagaacctcacccaccacatcgcagcgcagctgcgggctatggcaaccatgcgtacaacaactgccatggtggcggcggcttggtagcagcagcagcgggggcgtcaatgctctcctctgccttcgagcccccgcctggcggtggcggatgtgtcgcaggagctaccgcggccgacagttcatgcgcattaagcttattatcaactcagccatgggatacgcccacccaaagtggcagcagccaccacaaccggtccccagcgatgtccgcggctgcaggcgccttcgaagtggcgccgtcgtccgtcgtggcgagcagctacacggcgtcgagctcctggtctggctcacgggaccctgccgacggcgccaggaaaaacgcgcagcgtcacgatgatggcctgcacctggtccatccaccaggccccgtccaccacggccacttctccggcgagctcgagctcgccctgcagggaagcggcccgccgcatgtcgaccatggcggcggcacctgcttcagccattctgacaccaacgcgatgaattggtccctg

SEQ ID NO: 1178 - DNA, 1149 bp, Artificial sequence
  MiR ressistant mutated nucleic acid sequence
atggcgaccggcggcggcggtgggagcgacgacttccacgggctcacgttcggccagaagatctacttcgagcaggacgcgggcgccgccggggggagcgcgacgggcggcaggaaggggaagggcgccgcggcgtccgcgagcgccgcccagccgccgcggtgccgggtggacgggtgcggcgtggatctgagcgccgtcaagcagtactactgccggcacaaggtgtgctacatgcactccaaggagccgcgcgtcttcgtcgccggcatcgagcagcgcttctgccagcagtgcagcaggttccaccagttacctgaatttgaccaagggaaacgaagctgccgccgccgcctcattggtcacaacgagcgccggaggaagccaccacctggaccactcacctcacgatacggcccgcttgctgcatcactagttcaagagcctggtaggttcaggagcttcctgctcgacttctcgtacccgagggttccaagcagcgtgagagatgatgcgtggcaatggcaagggatgcagcatggcggcgacaggatgctgctgggtaccgccagcgccatccagtggcatgggaaccaagaacctcacccaccacatcgcagcgcagctgcgggctatggcaaccatgcgtacaacaactgccatggtggcggcggcttggtagcagcagcagcgggggcgtcaatgctctcctctgccttcgagcccccgcctggcggtggcggatgtgtcgcaggagctaccgcggccgactcctcatgcgcattaagcttattatcaactcagccatgggatacgcccacccaaagtggcagcagccaccacaaccggtccccagcgatgtccgcggctgcaggcgccttcgaagtggcgccgtcgtccgtcgtggcgagcagctacacggcgtcgagctcctggtctggctcacgggaccctgccgacggcgccaggaaaaacgcgcagcgtcacgatgatggcctgcacctggtccatccaccaggccccgtccaccacggccacttctccggcgagctcgagctcgccctgcagggaagcggcccgccgcatgtcgaccatggcggcggcacctgcttcagccattctgacaccaacgcgatgaattggtccctg

SEQ ID NO: 1179 - DNA, 1149 bp, Artificial sequence; identical to SEQ ID NO: 1178
  MiR ressistant mutated nucleic acid sequence

SEQ ID NO: 1180 - DNA, 1149 bp, Artificial sequence; identical to SEQ ID NO: 1178
  MiR ressistant mutated nucleic acid sequence

SEQ ID NO: 1181 - DNA, 1149 bp, Artificial sequence; identical to SEQ ID NO: 1178
  MiR ressistant mutated nucleic acid sequence

SEQ ID NO: 1182 - DNA, 1149 bp, Artificial sequence; identical to SEQ ID NO: 1178
  MiR ressistant mutated nucleic acid sequence

SEQ ID NO: 1183 - DNA, 1149 bp, Artificial sequence
  MiR ressistant mutated nucleic acid sequence
atggcgaccggcggcggcggtgggagcgacgacttccacgggctcacgttcggccagaagatctacttcgagcaggacgcgggcgccgccggggggagcgcgacgggcggcaggaaggggaagggcgccgcggcgtccgcgagcgccgcccagccgccgcggtgccgggtggacgggtgcggcgtggatctgagcgccgtcaagcagtactactgccggcacaaggtgtgctacatgcactccaaggagccgcgcgtcttcgtcgccggcatcgagcagcgcttctgccagcagtgcagcaggttccaccagttacctgaatttgaccaagggaaacgaagctgccgccgccgcctcattggtcacaacgagcgccggaggaagccaccacctggaccactcacctcacgatacggcccgcttgctgcatcactagttcaagagcctggtaggttcaggagcttcctgctcgacttctcgtacccgagggttccaagcagcgtgagagatgatgcgtggcaatggcaagggatgcagcatggcggcgacaggatgctgctgggtaccgccagcgccatccagtggcatgggaaccaagaacctcacccaccacatcgcagcgcagctgcgggctatggcaaccatgcgtacaacaactgccatggtggcggcggcttggtagcagcagcagcgggggcgtcaatgctctcctctgccttcgagcccccgcctggcggtggcggatgtgtcgcaggagctaccgcggccgacagtagctgcgcattaagcttattatcaactcagccatgggatacgcccacccaaagtggcagcagccaccacaaccggtccccagcgatgtccgcggctgcaggcgccttcgaagtggcgccgtcgtccgtcgtggcgagcagctacacggcgtcgagctcctggtctggctcacgggaccctgccgacggcgccaggaaaaacgcgcagcgtcacgatgatggcctgcacctggtccatccaccaggccccgtccaccacggccacttctccggcgagctcgagctcgccctgcagggaagcggcccgccgcatgtcgaccatggcggcggcacctgcttcagccattctgacaccaacgcgatgaattggtccctg

SEQ ID NO: 1184 - DNA, 1149 bp, Artificial sequence; identical to SEQ ID NO: 1183
  MiR ressistant mutated nucleic acid sequence

SEQ ID NO: 1185 - DNA, 1149 bp, Artificial sequence; identical to SEQ ID NO: 1183
  MiR ressistant mutated nucleic acid sequence

SEQ ID NO: 1186 - DNA, 1149 bp, Artificial sequence; identical to SEQ ID NO: 1183
  MiR ressistant mutated nucleic acid sequence

SEQ ID NO: 1187 - protein, 329 aa, Zea mays; identical to SEQ ID NO: 987

SEQ ID NO: 1188 - DNA, 1304 bp, Zea mays; identical to SEQ ID NO: 1065

SEQ ID NO: 1189 - DNA, 987 bp, Zea mays
ccctcgacggcgcccgcgcccgcccgctgccaggtcgacggctgcaacgttgacctcaccgacgtcaagcccgcctactactgccgccacaaggtgtgcaaaatgcactccaaggagccccgcgtcctcgtcaacggcctcgagcagcgcttctgccagcagtgcagcaggttccaccagctgcctgaattcgaccagctaaagaagagctgccgcaaacgcctcgcaggccacaacgagcgccggaggaggccgccgcctggaccccttgcgtcacgatacggccgtcacgctgcgtcgctcggcgagcccggcaggctcagaagcttcatgctggatttctcgtacccgagggtctcaagcgccatgaggggtgggtttccggcggtgaggcccggtggtgaaagggtgcctggcggtatccagtggcaagcgggcttggatcctcgtcaccaccaaggcgcggtcgcgggatacggcgcccactatgggagcgagggtggtagctcgtcgtcggcgaggccgccggtgttccctggcccggagctgcccccaggtggatgccttgcaggagtccccgcggactccagctgtgctctctctcttctgtcaactcagccatgggatgctgcccacagccacagccacagccacgctgcgccaacagcgggtttcgacggcggcagccctgtggcgccctccctcatggcggcgagtagctacatcgcgccgagcccctggaccgagaccgactcctggggccacgaaggcgggcggagcgtgcctcagctgccacctgacgacgtccccctcggcgaggtgcactccggctcgagcagccaccacggccagttctcaggtgagctcgagctcgccctgcagggaaacaggccagcgccagggtcggcggcaccgccagcgccgcgcaataatcagggctccgcgggcacgttcgaccaggctggcaacacgatggactggtcgctc

SEQ ID NO: 1190 - DNA, 987 bp, Artificial sequence
  MiR ressistant mutated nucleic acid sequence
ccctcgacggcgcccgcgcccgcccgctgccaggtcgacggctgcaacgttgacctcaccgacgtcaagcccgcctactactgccgccacaaggtgtgcaaaatgcactccaaggagccccgcgtcctcgtcaacggcctcgagcagcgcttctgccagcagtgcagcaggttccaccagctgcctgaattcgaccagctaaagaagagctgccgcaaacgcctcgcaggccacaacgagcgccggaggaggccgccgcctggaccccttgcgtcacgatacggccgtcacgctgcgtcgctcggcgagcccggcaggctcagaagcttcatgctggatttctcgtacccgagggtctcaagcgccatgaggggtgggtttccggcggtgaggcccggtggtgaaagggtgcctggcggtatccagtggcaagcgggcttggatcctcgtcaccaccaaggcgcggtcgcgggatacggcgcccactatgggagcgagggtggtagctcgtcgtcggcgaggccgccggtgttccctggcccggagctgcccccaggtggatgccttgcaggagtccccgcggacagttcatgcgcattaagcttattatcaactcagccatgggatgctgcccacagccacagccacagccacgctgcgccaacagcgggtttcgacggcggcagccctgtggcgccctccctcatggcggcgagtagctacatcgcgccgagcccctggaccgagaccgactcctggggccacgaaggcgggcggagcgtgcctcagctgccacctgacgacgtccccctcggcgaggtgcactccggctcgagcagccaccacggccagttctcaggtgagctcgagctcgccctgcagggaaacaggccagcgccagggtcggcggcaccgccagcgccgcgcaataatcagggctccgcgggcacgttcgaccaggctggcaacacgatggactggtcgctc

SEQ ID NO: 1191 - DNA, 987 bp, Artificial sequence
  MiR ressistant mutated nucleic acid sequence
ccctcgacggcgcccgcgcccgcccgctgccaggtcgacggctgcaacgttgacctcaccgacgtcaagcccgcctactactgccgccacaaggtgtgcaaaatgcactccaaggagccccgcgtcctcgtcaacggcctcgagcagcgcttctgccagcagtgcagcaggttccaccagctgcctgaattcgaccagctaaagaagagctgccgcaaacgcctcgcaggccacaacgagcgccggaggaggccgccgcctggaccccttgcgtcacgatacggccgtcacgctgcgtcgctcggcgagcccggcaggctcagaagcttcatgctggatttctcgtacccgagggtctcaagcgccatgaggggtgggtttccggcggtgaggcccggtggtgaaagggtgcctggcggtatccagtggcaagcgggcttggatcctcgtcaccaccaaggcgcggtcgcgggatacggcgcccactatgggagcgagggtggtagctcgtcgtcggcgaggccgccggtgttccctggcccggagctgcccccaggtggatgccttgcaggagtccccgcggactcctcatgcgcattaagcttattatcaactcagccatgggatgctgcccacagccacagccacagccacgctgcgccaacagcgggtttcgacggcggcagccctgtggcgccctccctcatggcggcgagtagctacatcgcgccgagcccctggaccgagaccgactcctggggccacgaaggcgggcggagcgtgcctcagctgccacctgacgacgtccccctcggcgaggtgcactccggctcgagcagccaccacggccagttctcaggtgagctcgagctcgccctgcagggaaacaggccagcgccagggtcggcggcaccgccagcgccgcgcaataatcagggctccgcgggcacgttcgaccaggctggcaacacgatggactggtcgctc

SEQ ID NO: 1192 - DNA, 987 bp, Artificial sequence; identical to SEQ ID NO: 1191
  MiR ressistant mutated nucleic acid sequence

SEQ ID NO: 1193 - DNA, 987 bp, Artificial sequence; identical to SEQ ID NO: 1191
  MiR ressistant mutated nucleic acid sequence

SEQ ID NO: 1194 - DNA, 987 bp, Artificial sequence; identical to SEQ ID NO: 1191
  MiR ressistant mutated nucleic acid sequence

SEQ ID NO: 1195 - DNA, 987 bp, Artificial sequence; identical to SEQ ID NO: 1191
  MiR ressistant mutated nucleic acid sequence

SEQ ID NO: 1196 - DNA, 987 bp, Artificial sequence
  MiR ressistant mutated nucleic acid sequence
ccctcgacggcgcccgcgcccgcccgctgccaggtcgacggctgcaacgttgacctcaccgacgtcaagcccgcctactactgccgccacaaggtgtgcaaaatgcactccaaggagccccgcgtcctcgtcaacggcctcgagcagcgcttctgccagcagtgcagcaggttccaccagctgcctgaattcgaccagctaaagaagagctgccgcaaacgcctcgcaggccacaacgagcgccggaggaggccgccgcctggaccccttgcgtcacgatacggccgtcacgctgcgtcgctcggcgagcccggcaggctcagaagcttcatgctggatttctcgtacccgagggtctcaagcgccatgaggggtgggtttccggcggtgaggcccggtggtgaaagggtgcctggcggtatccagtggcaagcgggcttggatcctcgtcaccaccaaggcgcggtcgcgggatacggcgcccactatgggagcgagggtggtagctcgtcgtcggcgaggccgccggtgttccctggcccggagctgcccccaggtggatgccttgcaggagtccccgcggacagtagctgcgcattaagcttattatcaactcagccatgggatgctgcccacagccacagccacagccacgctgcgccaacagcgggtttcgacggcggcagccctgtggcgccctccctcatggcggcgagtagctacatcgcgccgagcccctggaccgagaccgactcctggggccacgaaggcgggcggagcgtgcctcagctgccacctgacgacgtccccctcggcgaggtgcactccggctcgagcagccaccacggccagttctcaggtgagctcgagctcgccctgcagggaaacaggccagcgccagggtcggcggcaccgccagcgccgcgcaataatcagggctccgcgggcacgttcgaccaggctggcaacacgatggactggtcgctc

SEQ ID NO: 1197 - DNA, 987 bp, Artificial sequence; identical to SEQ ID NO: 1196
  MiR ressistant mutated nucleic acid sequence

SEQ ID NO: 1198 - DNA, 987 bp, Artificial sequence; identical to SEQ ID NO: 1196
  MiR ressistant mutated nucleic acid sequence

SEQ ID NO: 1199 - DNA, 987 bp, Artificial sequence; identical to SEQ ID NO: 1196
  MiR ressistant mutated nucleic acid sequence

SEQ ID NO: 1200 - DNA, 24 bp, Artificial Sequence
  Bulge Reverse Complement miR
gagttcccccactaaacacttcac

SEQ ID NO: 1201 - DNA, 24 bp, Artificial Sequence
  Bulge Reverse Complement miR
atgcagcatcactatcaagattcc

SEQ ID NO: 1202 - DNA, 24 bp, Artificial Sequence
  Bulge Reverse Complement miR
aggctgtactcctatctctcttct

SEQ ID NO: 1203 - DNA, 24 bp, Artificial Sequence
  Bulge Reverse Complement miR
caggcaaatcactatccctggcta

SEQ ID NO: 1204 - DNA, 24 bp, Artificial Sequence
  Bulge in Target Binding Sequence
gagttcctccactaagcacttcat

SEQ ID NO: 1205 - DNA, 24 bp, Artificial Sequence
  Bulge in Target Binding Sequence
ctgcagcatcactatcaggattct

SEQ ID NO: 1206 - DNA, 24 bp, Artificial Sequence
  Bulge in Target Binding Sequence
cgagtgtgctcctatctctcttct

SEQ ID NO: 1207 - DNA, 24 bp, Artificial Sequence
  Bulge in Target Binding Sequence
gtggcaactcactatccttggctc

SEQ ID NO: 1208 - DNA, 1996 bp, Artificial Sequence
  MiR target mimic nucleotide seqence
tcccatccaggttcacgcgcacccgcctcccctcttgccttttcctaatcaaatcacccacgcagccactgcgaaggtccggtggtggccgcctttcacaaaaccaaacaaaacgcacccgcaatataaagaggagaccaaggcgtgaagtggaggaggcagaggtggacgaggcgcgccaccgcccgagccgaatcgagctgcagaaaccaccttggcatggcgacacaggccgctttcctcgcagggttctcgcagctcgccgcgcagccgggccgcgaccgcgccgtggcggtggcggtggcgccggcgccgggcccggcccgggtggccgttgcggcggtgggtagcgccaagttgggcgtgaaggcggggacgtccaggaccgcggcggtggcgcgcctcggggtgcggtgccgggccagcctgatcgagcccgacggcgggcggctggtggacctggtggcgcccgaggagggcgggcggcgcgcggcgctgcggcgggaggcggcggagctgccgcaccggctgcgcttgggccgcgtcgacaaggaatgggtccacgtcctcagcgaagggtgggcgagcccgctgcaagggttcatgcgcgagcatgagttcctccactaagcacttcatttcaatgccatccgcggccaggatggcaggatggtcaacatgtccgtccccatcgtgctctctgtcggggacgcacagcgaagggccatccaggccgacggcgccacgcgcgtcgcgctcgttgacgagcgcgaccgccccatcgccgtcctcagcgacattgagatctataagcataataaggaagaaagggtagcacggacatgggggacaactgcacctggattaccttatgtcgaggaggcaattaccaatgctggtgactggttggttggtggggacttggaggttatagaaccaatcaagtacaacgatggtctagatcagtatcgcctgtctccagcacagctgcgtgaagagtttgccaggcgcaatgctgatgcagtatttgcctttcagcttcgcaatcctgtacacaatgggcatgctcttcttatgaccgacacacgcaaacgtctccttgagatgggttataaaaaccctgttcttctgctccatccactgggaggattcacaaaagcagatgatgtgcctcttagttggagaatgaagcaacatgagaaggttcttgaggaaggtgtcctcaacccagaatcaactgttgttgcgatctttccctctccaatgcattatgctgggccaactgaggtgcagtggcatgctaaggctcgtattaatgctggtgcaaatttctatattgttggaagggatcctgctggtatgagccatcccacggagaaaagggacctctatgatgctgaccacgggaagaaggttttgagcatggctcctggcctcgagaggctcaacatccttcctttcaaggtggctgcatatgacacaaagcaaaagaaaatggatttcttcgatccatcaaggaaagatgatttcctcttcatctctggcacaaagatgcgcactcttgccaagaaccgcgagagtcccccggatggttttatgtgcccgggtggctggaaagtgctcgttgaatactatgacagcttggtgccatccgagggcagcagcaagctgcgcgagccagttgcagcctgaaatatgggaagcgcttcagataaggaaccgtactatgtcagcacaagcggttctttgcgacatagaaccgttgttgtatgattgtatactggcttgtaagacttaaaaacactgggcttgatttggacgttaatgtgtgcattgtaactggtgtgccctatctgctgacagtgttgcacatcacatgtttggtgttaataaggacagactatgtatcatctgccagattgttgtacatatacattgtggtgatataaacatgaagctgtcttctgctattttataaccagttctttttaagcat

SEQ ID NO: 1209 - DNA, 38 bp, Zea mays
cattgcgacggtcctcgaggatgctgacgcaatgtgat

SEQ ID NO: 1210 - DNA, 66 bp, Zea mays
tagccaagcatgatttgcccgtagtctgactctgagtgtgctcctgctacgggcaaatcatcttgg

SEQ ID NO: 1211 - DNA, 139 bp, Zea mays
cctcggccttggcggcttctgtcttctcatcagacattttgcggagccgctgttttttcggtctcaccgaagggtcgattcccaagatgtgctcgatgatggagcgactgaccccgaccaagtcgagggcagaccaggc

SEQ ID NO: 1212 - DNA, 368 bp, Zea mays
aggatgtgaggctattggggacccggagatgacacatgcgttgagggcatgtgaaagaaagaagatgaagaatataatgacattccaatatgattggaatgatgaagtcattgcccagttttactcaactctgtggatcaagctagccaatgaggaaagtccctataactttccttatcttaacttctacatcgaaggcagctggtacaaggtgagctaccgtcggtttgctcacattcttggattcactgacaatgatatttctggtgataagatcaaaatccatgatttccgccaacctaccaaagatgaagccagcgatcttcatctctctgagtctggaaaatattgggagtccaccaacatgc
